(19) United States
(12) Patent Application Publication
(10) Pub. No.: US 2009/0203547 A1
(43) Pub. Date: Aug. 13, 2009

(54) Gene and Cognate Protein Profiles and Methods to Determine Connective Tissue Markers in Normal and Pathologic Conditions

(76) Inventors: Albert Banes, Hillsborough, NC (US); Jie Qi, Chapel Hill, NC (US); Donald K. Bynum, Durham, NC (US); Beverly Koller, Chapel Hill, NC (US); Jeffrey Thompson, Durham, NC (US); Ann Fox, Broomfield, CO (US); Allison Nation, Victoria (AU)

Correspondence Address: JENKINS, WILSON, TAYLOR & HUNT, P. A., Suite 1200 UNIVERSITY TOWER, 3100 TOWER BLVD.,, DURHAM, NC, 27707, US

(21) Appl. No.: 11/884,496

(22) PCT Filed: Feb. 21, 2006
(86) PCT No.: PCT/US2006/005948

§ 371 Date: Mar. 2, 2009

Related U.S. Application Data
(60) Provisional application No. 60/654,232, filed on Feb. 18, 2005.

(51) Int. Cl. C40B 40/06; C12Q 1/68

(52) U.S. Cl. 506/16; 435/6

(57) ABSTRACT

Differences in gene expression between connective tissue cells (e.g., tendon cells) and other closely related cell types are disclosed. Also disclosed are expression profiles between tendon cells under different genetic and environmental influences. The presently disclosed expression profiles are useful as diagnostic markers as well as markers that can be used to monitor disease states, disease progression, injury repair, drug toxicity, drug efficacy, and drug metabolism.

### RELATED APPLICATIONS

[0001] This application claims the benefit of U.S. Provisional Patent Application Ser. No. 60/654,232, filed Feb. 18, 2005, the disclosure of which is incorporated herein by reference in its entirety.

### TECHNICAL FIELD

[0002] The presently disclosed subject matter identifies differences in gene expression between cells and other closely related cell types. For example, gene expression in tendon cells relative to muscle cells is examined. The presently disclosed subject matter also identifies expression profiles between cells under different genetic and environmental influences. The presently disclosed subject matter also identifies expression profiles that serve as useful diagnostic markers as well as markers that can be used to monitor disease states, disease progression, injury repair, drug toxicity, drug efficacy, and drug metabolism.

### SEQUENCE LISTING PROVIDED ON CD-R

[0003] The Sequence Listing associated with the instant disclosure has been submitted as a 2.4 MB file on CD-R (in triplicate) instead of on paper. Each CD-R is marked in indelible ink to identify the Applicants, Title, File Name (421-140 PCT.ST25.txt)), Creation Date (Feb. 21, 2006), Computer System (IBM-PC/MS-DOS/MS-Windows), and Docket No. (421-140 PCT). The Sequence Listing submitted on CD-R is hereby incorporated by reference into the instant disclosure.

### BACKGROUND

[0004] A goal of the fields of genomics and proteomics is to utilize expression profiles of tissues to establish molecular markers that describe a given tissue at a stage of phenotype development from neonatal to juvenile to mature. In addition, a goal of these disciplines and technologies is to discover molecular markers that can be used to diagnose a stage of pathology. In some cases, an early stage of development might share some markers with a stage of pathology as in early markers of development recurring during healing from a wound. In other cases, a novel marker might be present that is indicative of a stage of disease such as a specific cancer such as breast or prostate cancer.

[0005] In the case of marker selection for connective tissues such as tendon, little work has been done to develop methodologies with respect to the selection of markers or to the development of expression profiles that are specific to such tissues. The identification of specific markers and the elucidation of changes in gene expression profiles that occur during injury and/or disease processes, as well as during the repair of and/or recovery from the same, would be extremely valuable for the diagnosis and/or monitoring of connective tissue disorders.

### SUMMARY

[0006] The presently disclosed subject matter provides methods for detecting connective tissue-specific gene expression in a sample. In some embodiments, the methods comprise detecting a level of expression in a sample of at least one gene for which expression is connective tissue-specific. In some embodiments, the connective tissue is selected from the group consisting of muscle and tendon. In some embodiments, the connective tissue is tendon. In some embodiments, the at least one gene is selected from the group consisting of those genes listed in Tables 1-4. In some embodiments, the detecting comprising hybridizing a nucleic acid isolated from the sample to an array comprising the at least one gene.

[0007] The presently disclosed subject matter also provides methods for diagnosing a disease of or an injury to a connective tissue in a mammalian subject. In some embodiments, the methods comprise detecting a level of expression in a biological sample of at least one gene for which an expression level is indicative of disease or injury in a connective tissue. In some embodiments, the connective tissue is selected from the group consisting of muscle and tendon. In some embodiments, the connective tissue is tendon. In some embodiments, the at least one gene is selected from the group consisting of those genes listed in Tables 1-4. In some embodiments, differential expression of at least one of the genes listed in Tables 1-4 is indicative of a disease or injury to a tendon. In some embodiments, the detecting comprising hybridizing a nucleic acid isolated from a sample isolated from the mammalian subject to an array comprising the at least one gene.

[0008] The presently disclosed subject matter also provides methods for detecting the progression of a disease of or an injury to a connective tissue in a mammalian subject. In some embodiments, the methods comprise detecting a level of expression in a biological sample of at least one gene for which an expression level is indicative of progression of a disease or injury in a connective tissue. In some embodiments, the connective tissue is selected from the group consisting of muscle and tendon. In some embodiments, the connective tissue is tendon. In some embodiments, the at least one gene is selected from the group consisting of those genes listed in Tables 1-4. In some embodiments, differential expression of at least one of the genes listed in Tables 1-4 is indicative of progression of a disease of or an injury to a tendon. In some embodiments, the detecting comprising hybridizing a nucleic acid isolated from a sample isolated from the mammalian subject to an array comprising the at least one gene.

[0009] The presently disclosed subject matter also provides methods for monitoring the treatment of a mammalian subject with a disease of or an injury to a connective tissue. In some embodiments, the methods comprise (a) providing a treatment to the subject; (b) detecting a level of expression of at least one gene from a cell or biological sample from the subject; and (c) comparing the level of expression detected in step (b) to a level of expression from a cell population comprising normal connective tissue cells, to a level of expression from a cell population comprising diseased or injured connective tissue, or both. In some embodiments, the connective tissue is selected from the group consisting of muscle and tendon. In some embodiments, the connective tissue is tendon. In some embodiments, the at least one gene is selected from the group consisting of those genes listed in Tables 1-4. In some embodiments, differential expression of at least one of the genes listed in Tables 1-4 is indicative of an effect of the treatment provided on a disease of or an injury to a tendon. In some embodiments, the detecting comprising hybridizing a nucleic acid isolated from a sample isolated from the mammalian subject to an array comprising the at least one gene.

[0010] The presently disclosed subject matter also provides kits for detecting expression of a gene differentially expressed in a connective tissue. In some embodiments, the kits comprise a plurality of reagents that can be used to detect expression levels for at least one gene for which expression is connective tissue-specific. In some embodiments, the at least one gene is selected from the group consisting of those genes listed in Tables 1-4. In some embodiments, the plurality of reagents comprise at least one oligonucleotide pair that can be used to specifically amplify at least one of the genes listed in Tables 1-4. In some embodiments, the kits further comprise one or more solid supports comprising one or more oligonucleotides attached thereto that specifically bind to at least one of the genes listed in Tables 1-4. In some embodiments, the one or more solid supports comprise an array, a microarray, or combinations thereof.

[0011] Accordingly, it is an object of the presently disclosed subject matter to provide specific marker genes and profiles of gene expression changes that occur as a result of, and subsequent to, connective tissue injury and/or disease. This and other objects are achieved in whole or in part by the presently disclosed subject matter.

[0012] An object of the presently disclosed subject matter having been stated above, other objects and advantages of the presently disclosed subject matter will become apparent to those of ordinary skill in the art after a study of the following description and non-limiting Examples.

### BRIEF DESCRIPTION OF THE SEQUENCE LISTING

[0013] SEQ ID NOs: 1-724 correspond to publicaly available nucleotide sequences for the database Accession Numbers presented in Tables 1-4.

### DETAILED DESCRIPTION

[0014] A goal in the connective tissue field, including that of hard tissues (bone, cartilage, fibrocartilage) as well as soft connective tissues (tendons, ligaments, menisci, muscle, fascia, sheaths, etc.) is to develop specific markers that characterize a given tissue, particularly with respect to pathology and staging of disease and/or injury processes. Investigators generally focus on the study of naturally occurring diseases to search for pathognomonic markers for cells and/or tissues of interest based on the assumption that one can learn about normal tissue development from studying pathologic processes. Important areas in hard tissue biology include rheumatoid arthritis and the search for markers that indicate a stage of the disease and whether or not it is progressing, is static, or is regressing.

[0015] The practical importance of finding and utilizing such markers and assessment strategies includes the ability to perform drug discovery research to identify pharmaceutical therapies that block or modulate the disease and to stage the disease to discern if the treatment therapy is working. Other practical outcomes of the latter diagnostic test data include, but are not limited to allowing judgments to be made as to whether a patient should receive a given treatment, whether insurers should pay for the treatment, and whether or not a patient is responding to the treatment and should continue a given drug therapy.

[0016] During the past decade, advances in the technology of disease markers has drastically changed from randomly searching for molecules that are affected by disease to those which are specifically regulated or co-regulated differently in disease versus non-disease states and represent an expression profile of the disease state. In addition, the use of gene arrays wherein an investigator can sample the expression profile of an entire transcriptome at any point in time has allowed the development of focused strategies to select environmental conditions that favor the specific marker discovery.

[0017] One form of a gene array is a representation of a portion of each gene expressed by mammalian cells as an oligonucleotide chemically immobilized to a glass surface in a “spot”. Each spot is about 10 microns in diameter in a specific location on a glass slide that is 25×75 mm in dimension. In this way, a representation of at least 40,000 genes as oligonucleotide arrays can be positioned on the glass surface. One can then isolate RNA (total ribonucleic acid, although the important part of the sample is the messenger RNA (mRNA)) from a tissue specimen, convert the RNA into cDNA (complementary deoxyribonucleic acid), prepare fluorescently labeled (green dye, Cy 3) control cDNA from one specimen and fluorescently labeled (red dye, Cy 5) test cDNA from a subject, then hybridize the two differently colored cDNAs to the oligonucleotide array on the glass slide in a special hybridization chamber. Once the excess colored sample cDNAs are washed from the slide, the array can be visualized as colored spots. A spot representing a specific oligonucleotide and therefore a specific gene product that is colored green is one that is more highly expressed in the control specimen than in the test specimen. Likewise, a spot that is more highly colored red is one that is expressed more highly in the test specimen than in the control specimen.

[0018] In this way, one can compare the relative expression levels of each gene represented by an oligonucleotide in the gene array. There are programs that allow the analysis of the fluorescence intensity of each dye for each sample at each spot. The program allows for the accurate quantitation of the fluorescence intensities for each candidate cDNA as well as a comparison between the two specimens on each slide. The latter example is of a direct comparison between samples. One can also make an indirect comparison between and among samples hybridized to targets on other slides, as long as the slides are of high quality and reproducibility. One such slide type is that produced by Agilent Technologies, Inc. (Palo Alto, Calif., United States of America), and is the 44 k whole mouse genome or the whole human genome slide. The spot intensities can be read in a slide reader, specially designed to read this type of slide to yield intensities for each spot. Quality control of control spots that are distributed over the slide is also done. Once this basic spot intensity quantitation is performed, then intensities of replicate spots can be determined among three or more replicates of each sample on different slides.

[0019] A further technique that is used to analyze the reproducibility of the expression levels of each spot is a statistical measure of the mean and standard deviation. A SAM (supervised analysis of microarray; Tusher et al., 2001) plot can then be calculated which yields the number of genes whose expression levels are statistically different between the two samples. SAGE analysis (supervised analysis of gene arrays) includes partitioning the data into groups of genes that are expressed by 2, 3, 4, 8, and more fold differences, usually in two fold increments. The data are generally expressed as log base 2 of the mean of the fluorescence intensities for each spot. In this way, one can select genes that are highly overexpressed or underexpressed in any comparison.

### I. DEFINITIONS

[0020] Unless otherwise defined, all technical and scientific terms used herein have the same meaning as commonly understood by one of ordinary skill in the art to which the presently disclosed subject matter pertains. For clarity of the present specification, certain definitions are presented hereinbelow.

[0021] Following long-standing patent law convention, the articles “a”, “an”, and “the” refer to “one or more” when used in this application, including in the claims. For example, the phrase “a tendon cell” refers to one or more tendon cells. Similarly, the phrase “at least one”, when employed herein to refer to an oligonucleotide, a gene, or any other entity, refers to, for example, 1, 2, 3, 4, 5, 6, 7, 8, 9, 10, 15, 20, 25, 50, 100, or more of that entity. Thus, the phrase “at least one gene” used in the context of the genes disclosed in Tables 1-4, refers to 1, 2, 3, 4, 5, 6, 7, 8, 9, 10, up to every gene disclosed in Tables 1-4, including every value in between.

[0022] As used herein, the phrase “biological sample” refers to a sample isolated from a subject (e.g., a biopsy) or from a cell or tissue from a subject (e.g., RNA isolated from, or cDNA reverse transcribed and/or derived therefrom). In some embodiments, a biological sample is a clinical sample such as a biopsy or a sample otherwise removed from a subject for any purpose. Biological samples can be of any biological tissue or fluid or cells from any organism as well as cells cultured in vitro, such as cell lines and tissue culture cells. Frequently the sample will be a “clinical sample” which is a sample derived from a patient (i.e., a subject undergoing a diagnostic procedure and/or a treatment). Typical clinical samples include, but are not limited to, blood, blood cells (e.g., white cells), tissue or fine needle biopsy samples (e.g., a tendon biopsy), and cells therefrom. Biological samples can also include sections of tissues, such as frozen sections or formalin fixed sections taken for histological purposes.

[0023] As used herein, the term “complementary” refers to two nucleotide sequences that comprise antiparallel nucleotide sequences capable of pairing with one another upon formation of hydrogen bonds between the complementary base residues in the antiparallel nucleotide sequences. As is known in the art, the nucleic acid sequences of two complementary strands are the reverse complement of each other when each is viewed in the 5′ to 3′ direction. Unless specifically indicated to the contrary, the term “complementary” as used herein refers to 100% complementarity throughout the length of at least one of the two antiparallel nucleotide sequences.

[0024] As used herein, the term “fragment” refers to a sequence that comprises a subset of another sequence. When used in the context of a nucleic acid or amino acid sequence, the terms “fragment” and “subsequence” are used interchangeably. A fragment of a nucleic acid sequence can be any number of nucleotides that is less than that found in another nucleic acid sequence, and thus includes, but is not limited to, the sequences of an exon or intron, a promoter, an enhancer, an origin of replication, a 5′ or 3′ untranslated region, a coding region, and/or a polypeptide binding domain. It is understood that a fragment or subsequence can also comprise less than the entirety of a nucleic acid sequence, for example, a portion of an exon or intron, promoter, enhancer, etc. Similarly, a fragment or subsequence of an amino acid sequence can be any number of residues that is less than that found in a naturally occurring polypeptide, and thus includes, but is not limited to, domains, features, repeats, etc. Also similarly, it is understood that a fragment or subsequence of an amino acid sequence need not comprise the entirety of the amino acid sequence of the domain, feature, repeat, etc.

[0025] As used herein, the term “gene” is used broadly to refer to any segment of DNA associated with a biological function. Thus, genes include, but are not limited to, coding sequences, the regulatory sequences required for their expression, intron sequences associates with the coding sequences, and combinations thereof. Genes can also include non-expressed DNA segments that, for example, form recognition sequences for a polypeptide. Genes can be obtained from a variety of sources, including cloning from a source of interest or synthesizing from known or predicted sequence information, and can include sequences designed to have desired parameters.

[0026] The terms “heterologous”, “recombinant”, and “exogenous”, when used herein to refer to a nucleic acid sequence (e.g., a DNA sequence) or a gene, refer to a sequence that originates from a source foreign to the particular host cell or, if from the same source, is modified from its original form. Thus, a heterologous gene in a host cell includes a gene that is endogenous to the particular host cell but has been modified through, for example, the use of DNA shuffling or other recombinant techniques. The terms also include non-naturally occurring multiple copies of a naturally occurring DNA sequence. Thus, the terms refer to a DNA segment that is foreign to the cell, or homologous to the cell but in a position or form within the host cell in which the element is not ordinarily found. Similarly, when used in the context of a polypeptide or amino acid sequence, an exogenous polypeptide or amino acid sequence is a polypeptide or amino acid sequence that originates from a source foreign to the particular host cell or, if from the same source, is modified from its original form. Thus, exogenous DNA segments can be expressed to yield exogenous polypeptides.

[0027] An “endogenous” or “native” nucleic acid (or amino acid) sequence is a nucleic acid (or amino acid) sequence naturally associated with a host cell into which it is introduced. In this context, the terms “heterologous” and “endogenous” are antonymous.

[0028] The phrase “hybridizing specifically to” refers to the binding, duplexing, or hybridizing of a molecule only to a particular nucleotide sequence under stringent conditions when that sequence is present in a complex mixture (e.g., total cellular) of DNA and/or RNA. The phrase “bind(s) substantially” refers to complementary hybridization between a probe nucleic acid and a target nucleic acid and embraces minor mismatches that can be accommodated by reducing the stringency of the hybridization media to achieve the desired detection of the target nucleic acid sequence.

[0029] As used herein, the term “isolated”, when used in the context of an isolated nucleic acid or an isolated polypeptide, is a nucleic acid or polypeptide that, by the hand of man, exists apart from its native environment and is therefore not a product of nature. An isolated nucleic acid molecule or polypeptide can exist in a purified form or can exist in a non-native environment such as, for example, in a transformed host cell.

[0030] As used herein, the term “native” refers to a gene that is naturally present in the genome of an untransformed cell. Similarly, when used in the context of a polypeptide, a “native polypeptide” is a polypeptide that is encoded by a native gene of an untransformed cell's genome. Thus, the terms “native” and “endogenous” are synonymous.

[0031] As used herein, the term “naturally occurring” refers to an object that is found in nature as distinct from being artificially produced or manipulated by man. For example, a polypeptide or nucleotide sequence that is present in an organism (including a virus) in its natural state, which has not been intentionally modified or isolated by man in the laboratory, is naturally occurring. As such, a polypeptide or nucleotide sequence is considered “non-naturally occurring” if it is encoded by or present within a recombinant molecule, even if the amino acid or nucleic acid sequence is identical to an amino acid or nucleic acid sequence found in nature.

[0032] As used herein, the term “nucleic acid” refers to deoxyribonucleotides or ribonucleotides and polymers thereof in either single- or double-stranded form. Unless specifically limited, the term encompasses nucleic acids containing known analogues of natural nucleotides that have similar binding properties as the reference nucleic acid and are metabolized in a manner similar to naturally occurring nucleotides. Unless otherwise indicated, a particular nucleic acid sequence also implicitly encompasses conservatively modified variants thereof (e.g., degenerate codon substitutions) and complementary sequences and as well as the sequence explicitly indicated. Specifically, degenerate codon substitutions can be achieved by generating sequences in which the third position of one or more selected (or all) codons is substituted with mixed-base and/or deoxyinosine residues (Batzer et al., 1991; Ohtsuka et al., 1985; Rossolini et al., 1994). The terms “nucleic acid” or “nucleic acid sequence” can also be used interchangeably with gene, cDNA, and mRNA encoded by a gene.

[0033] As used herein, the phrase “oligonucleotide” refers to a polymer of nucleotides of any length. In some embodiments, an oligonucleotide is a primer that is used in a polymerase chain reaction (PCR) and/or reverse transcription-polymerase chain reaction (RT-PCR), and the length of the oligonucleotide is typically between about 15 and 30 nucleotides. In some embodiments, the oligonucleotide is present on an array and is specific for a gene of interest. In whatever embodiment that an oligonucleotide is employed, one of ordinary skill in the art is capable of designing the oligonucleotide to be of sufficient length and sequence to be specific for the gene of interest (i.e., that would be expected to specifically bind only to a product of the gene of interest under a given hybridization condition).

[0034] As used herein, the phrase “percent identical”, in the context of two nucleic acid or polypeptide sequences, refers to two or more sequences or subsequences that have in some embodiments 60%, in some embodiments 70%, in some embodiments 75%, in some embodiments 80%, in some embodiments 85%, in some embodiments 90%, in some embodiments 92%, in some embodiments 94%, in some embodiments 95%, in some embodiments 96%, in some embodiments 97%, in some embodiments 98%, in some embodiments 99%, and in some embodiments 100% nucleotide or amino acid residue identity, respectively, when compared and aligned for maximum correspondence, as measured using one of the following sequence comparison algorithms or by visual inspection. The percent identity exists in some embodiments over a region of the sequences that is at least about 50 residues in length, in some embodiments over a region of at least about 100 residues, and in some embodiments, the percent identity exists over at least about 150 residues. In some embodiments, the percent identity exists over the entire length of the sequences.

[0035] For sequence comparison, typically one sequence acts as a reference sequence to which test sequences are compared. When using a sequence comparison algorithm, test and reference sequences are input into a computer, subsequence coordinates are designated if necessary, and sequence algorithm program parameters are designated. The sequence comparison algorithm then calculates the percent sequence identity for the test sequence(s) relative to the reference sequence, based on the designated program parameters.

[0036] Optimal alignment of sequences for comparison can be conducted, for example, by the local homology algorithm disclosed in Smith & Waterman, 1981; by the homology alignment algorithm disclosed in Needleman & Wunsch, 1970; by the search for similarity method disclosed in Pearson & Lipman, 1988; by computerized implementations of these algorithms (GAP, BESTFIT, FASTA, and TFASTA in the GCG® WISCONSIN PACKAGE®, available from Accelrys, Inc., San Diego, Calif., United States of America), or by visual inspection. See generally, Altschul et al., 1990; Ausubel et al., 2002; and Ausubel et al., 2003.

[0037] One example of an algorithm that is suitable for determining percent sequence identity and sequence similarity is the BLAST algorithm, which is described in Altschul et al., 1990. Software for performing BLAST analysis is publicly available through the website of the National Center for Biotechnology Information. This algorithm involves first identifying high scoring sequence pairs (HSPs) by identifying short words of length W in the query sequence, which either match or satisfy some positive-valued threshold score T when aligned with a word of the same length in a database sequence. T is referred to as the neighborhood word score threshold. See generally, Altschul et al., 1990. These initial neighborhood word hits act as seeds for initiating searches to find longer HSPs containing them. The word hits are then extended in both directions along each sequence for as far as the cumulative alignment score can be increased. Cumulative scores are calculated using, for nucleotide sequences, the parameters M (reward score for a pair of matching residues; always >0) and N (penalty score for mismatching residues; always <0). For amino acid sequences, a scoring matrix is used to calculate the cumulative score. Extension of the word hits in each direction are halted when the cumulative alignment score falls off by the quantity X from its maximum achieved value, the cumulative score goes to zero or below due to the accumulation of one or more negative-scoring residue alignments, or the end of either sequence is reached. The BLAST algorithm parameters W, T, and X determine the sensitivity and speed of the alignment. The BLASTN program (for nucleotide sequences) uses as defaults a wordlength (W) of 11, an expectation (E) of 10, a cutoff of 100, M=5, N=−4, and a comparison of both strands. For amino acid sequences, the BLASTP program uses as defaults a wordlength (W) of 3, an expectation (E) of 10, and the BLOSUM62 scoring matrix. See Henikoff & Henikoff, 1992.

[0038] In addition to calculating percent sequence identity, the BLAST algorithm also performs a statistical analysis of the similarity between two sequences (see e.g., Karlin & Altschul, 1993). One measure of similarity provided by the BLAST algorithm is the smallest sum probability (P(N)), which provides an indication of the probability by which a match between two nucleotide or amino acid sequences would occur by chance. For example, a test nucleic acid sequence is considered similar to a reference sequence if the smallest sum probability in a comparison of the test nucleic acid sequence to the reference nucleic acid sequence is in some embodiments less than about 0.1, in some embodiments less than about 0.01, and in some embodiments less than about 0.001.

[0039] As used herein, the term “subject” refers to any organism for which analysis of gene expression would be desirable. Thus, the term “subject” is desirably a human subject, although it is to be understood that the principles of the presently disclosed subject matter indicate that the presently disclosed subject matter is effective with respect to invertebrate and to all vertebrate species, including mammals, which are intended to be included in the term “subject”. Moreover, a mammal is understood to include any mammalian species in which detection of differential gene expression is desirable, particularly agricultural and domestic mammalian species. The methods of the presently disclosed subject matter are particularly useful in the analysis of gene expression in warm-blooded vertebrates, e.g., mammals and birds.

[0040] More particularly, the presently disclosed subject matter can be used for the analysis of gene expression (e.g., connective tissue gene expression) in a mammal such as a human. Also provided is the analysis of gene expression in mammals of importance due to being endangered (such as Siberian tigers), of economic importance (animals raised on farms for consumption by humans) and/or social importance (animals kept as pets or in zoos) to humans, for instance, carnivores other than humans (such as cats and dogs), swine (pigs, hogs, and wild boars), ruminants (such as cattle, oxen, sheep, giraffes, deer, goats, bison, and camels), and horses (e.g., thoroughbreds and race horses). Also provided is the analysis of gene expression of birds, including those kinds of birds that are endangered, or kept in zoos, as well as fowl, and more particularly domesticated fowl, e.g., poultry, such as turkeys, chickens, ducks, geese, guinea fowl, quail, pheasant, and the like, as they are also of economic importance to humans. Thus, provided is the analysis of gene expression in livestock, including, but not limited to, domesticated swine (pigs and hogs), ruminants, poultry, and the like.

### II. ANALYSIS OF DIFFERENTIAL GENE EXPRESSION

[0041] Many biological functions are accomplished by altering the expression of various genes through transcriptional (e.g., through control of initiation, provision of RNA precursors, RNA processing, etc.) and/or translational control. For example, fundamental biological processes such as cell cycle, cell differentiation, and cell death, are often characterized by the variations in the expression levels of groups of genes.

[0042] Thus, differential gene expression can result in the differentiation of a pluripotent precursor cell into different cell types (e.g., the differentiation of tendon cells from pluripotent mesenchymal stem cells). As this differentiation takes place, unique combinations of genes are typically expressed in different terminally differentiated cell types, and the expression of these unique combinations of genes can be identified. As disclosed herein, genes that are differentially expressed in cells of connective tissue (e.g., tendon cells) as compared to cells of other related tissues (e.g., muscle cells) have been identified.

[0043] II.A. Identification of Connective Tissue-Specific Genes

[0044] The presently disclosed subject matter provides in some embodiments methods for identifying connective tissue-specific genes. As used herein, the phrase “connective tissue” refers to those tissues that are typically classified as soft connective tissues including, for example, tendons, ligaments, menisci, muscle, fascia, sheaths and the like. Included within the definition of “connective tissue” are terminally differentiated cells as well as precursor cells that have the potential to differentiate into connective tissue cells and tissues.

[0045] The presently disclosed subject matter provides in some embodiments methods for detecting tendon-specific gene expression in a sample. In some embodiments, the methods comprise detecting a level of expression in a sample of at least one gene listed in Tables 1-4, wherein the at least one gene is tendon-specific. In some embodiments, the methods comprise detecting a level of expression in a sample of at least 1, 2, 3, 4, 5, 6, 7, 8, 9, 10, 15, 20, 25, 50, or more of the genes listed in Tables 1-4, wherein the at least 1, 2, 3, 4, 5, 6, 7, 8, 9, 10, 15, 20, 25, 50, or more of the genes are tendon-specific. In some embodiments, the 1, 2, 3, 4, 5, 6, 7, 8, 9, 10, or more genes that are tendon-specific are listed in Table 1B.

[0046] As used herein, the phrase “tendon-specific” refers in some embodiments to a gene that is expressed in a tendon cell and for which expression in some or all other cell types is negligible. Thus, in some embodiments “tendon-specific” means that the gene in question is expressed only in a tendon cell or a precursor cell committed to tendon differentiation.

[0047] In some embodiments, however, “tendon-specific” refers to a gene that is upregulated and/or expressed at a higher level in tendon cells and their committed precursors relative to another cell type. An example of a tendon-specific gene within this meaning is mouse procollagen, type I, alpha 1 (Col1a1; GENBANK® Accession No. NM_{—}007742), which as disclosed in Table 1B is expressed in Achilles tendon at a level that is more than 16 fold higher than the gene is expressed in gastrocnemius muscle. Thus, in these embodiments “tendon-specific” is used in a relative sense and not in an absolute sense.

[0048] Exemplary tendon-specific genes include those genes listed in Tables 1-4. In some embodiments, a tendon-specific gene is selected from the group consisting of those genes listed in Tables 1B, 2B, and 3A.

[0049] II.B. Identification of Chances in Gene Expression under Different Genetic Influences

[0050] The presently disclosed subject matter also provides in some embodiments methods for analyzing differential gene expression in a cell or tissue type that result from genetic differences between subjects or in the same subject at different times (e.g., before an after the occurrence of a mutation). In some embodiments, the genetic differences result from a mutation in (e.g., a targeted disruption of) one or more genes the products of which are normally expressed in a connective tissue, such as tendon.

[0051] An example of a genetic influence relevant to tendon development is the activity of the metabotropic purinoceptors P2Y₁ and P2Y₂ (also referred to as P2RY₁ and P2RY₂). These receptors are coupled to G-protein coupled receptors that activate a phosphatidylinositol-calcium second messenger system in many cell types including tendon cells. Targeted disruption of P2Y₁, P2Y₂, or both P2Y₁ and P2Y₂ greatly influences gene expression in tendons, as shown in Examples 2 and 3 and Tables 2 and 3.

[0052] II.C. Identification of Changes in Gene Expression During Different Physiological Responses

[0053] The presently disclosed subject matter also provides in some embodiments methods for analyzing differential gene expression in a cell or tissue type in response to different environmental factors including, but not limited to disease, injury, exposure to bioactive molecules, and combinations thereof.

[0054] Connective tissues, such as tendons, are constantly being remodeled in subjects as a result of normal use, and particularly in the event of injury or disease. All of these conditions (e.g., normal use, injury, and/or disease) induce both catabolic and anabolic responses in connective tissues, often inducing anabolic responses followed by catabolic responses as the connective tissue recovers and/or heals. Thus, it is desirable to analyze how gene expression is affected by processes that result in catabolic and/or anabolic pathways in connective tissues, such as tendons.

[0055] In some embodiments, a technique to stimulate expression of marker gene expression that is indicative of a catabolic pathway is the application of hyperphysiologic levels of exercise as mechanical load. Mechanical load, when given in a hyper-physiologic dose results in pathology and can result in matrix degradation and loss of material properties. Hence, one assessment of potential negative effects of hyperphysiologic mechanical load is the tensile strength of the biologic material. One method to test such a property is to apply a tensile load to a biologic tissue at a controlled rate and force and apply load until the specimen fails. The characteristics of the stress train curve yield a quantitative assessment of the material's modulus or degree of stiffness.

[0056] Next, another strategy to stimulate expression marker gene expression that is indicative of a catabolic pathway that represents the environmental scenario induced during a pathologic response can be used. An example of a catabolic factor is interleukin 1β (IL-1β), which induces a group of matrix destructive genes called matrix metalloproteinases (MMPs). These MMPs degrade the material that lends tensile load bearing strength to most connective tissues, particularly to tendons.

[0057] To simulate catabolic responses in tendons, tendon cells can be isolated and exposed to IL-1β (for example, human tendon cells can be treated in vitro with recombinant human IL-1β). Differential gene expression analysis can then be employed to analyze how tendon cells respond to catabolic conditions, and the genes identified as being responsive to catabolic activity can be identified. This technique is disclosed in Example 4 and the genes so identified are presented in Table 4.

[0058] II.D. Other Applications

[0059] The genes and gene expression information provided herein, such as in Tables 1-4, can also be used as markers for the monitoring of disease and/or injury progression and/or the progress of a treatment, for instance, a recovery from an injury to a connective tissue, such as a tendon. For example, a tendon tissue sample or other sample from a patient can be assayed by any of the approaches disclosed herein, and the expression levels in the sample from a gene or genes from Tables 1-4 can be compared to the expression levels found in a reference tissue, e.g. normal tendon tissue and/or discarded or injured tissue. Comparison of the expression data, as well as available sequence or other information can be done by researcher or diagnostician or can be done with the aid of a computer and databases as described herein. Representative treatments include pharmacological treatments, physical therapy treatments, and combinations thereof.

[0060] The genes and gene expression information provided herein, such as in Tables 1-4, can also be used as markers for the diagnosis of connective tissue disease, for instance, a disease of a connective tissue such as a tendon. For example, a tendon tissue sample or other sample from a patient suspected of having a tendon disease can be assayed by any of the approaches disclosed herein, and the expression levels in the sample from a gene or genes from Tables 1-4 can be compared to the expression levels found in a reference tissue, e.g. normal tendon tissue (e.g., from another tendon in the same subject or a different subject).

[0061] Monitoring changes in gene expression can also provide certain advantages during drug screening development. Often drugs are screened and prescreened for the ability to interact with a major target without regard to other effects the drugs have on cells. Often such other effects cause toxicity in the whole animal, which prevent the development and use of the potential drug.

[0062] According to the presently disclosed subject matter, the genes disclosed herein, for example those disclosed in Tables 1-4, can also be used as markers to evaluate the effects of a candidate drug or agent on a connective tissue cell, such as but not limited to a tendon cell undergoing repair from injury or disease, such as for example, a tendon cell or tendon tissue sample. A candidate drug or agent can be screened for the ability to stimulate the transcription or expression of a given marker or markers (drug targets) or to down-regulate or counteract the transcription or expression of a marker or markers. According to the presently disclosed subject matter, one can also compare the specificity of a drug's effects by looking at the number of markers that the drugs have and comparing them. More specific drugs will have fewer transcriptional targets. Similar sets of markers identified for two drugs indicate a similarity of effects.

[0063] Assays to monitor the expression of a marker or markers disclosed herein, such as those defined in Tables 1-4, can utilize any available technique of monitoring for changes in the expression level of the biosequences disclosed herein. As used herein, an agent is said to modulate the expression of a biosequence if it is capable of up- or down-regulating expression of the biosequence in a cell.

[0064] In some embodiments, gene chips containing oligonucleotides that specifically bind to at least one, two, three, four, five, six, seven, eight, nine, ten, or more genes from a target cell type (e.g., those genes disclosed in Tables 1-4) can be used to directly monitor or detect changes in gene expression in the treated or exposed cell. In another format, cell lines that contain reporter gene fusions between the open reading frame and/or the 3′ or 5′ regulatory regions of a gene (e.g., those listed in Tables 1-4) and any assayable fusion partner can be prepared. Numerous assayable fusion partners are known and readily available including the firefly luciferase gene and the gene encoding chloramphenicol acetyltransferase (Alam et al., 1990). Cell lines containing the reporter gene fusions are then exposed to the agent to be tested under appropriate conditions and time. Differential expression of the reporter gene between samples exposed to the agent and control samples identifies agents that modulate the expression of the nucleic acid.

[0065] Additional assay formats can be used to monitor the ability of the agent to modulate the expression of a gene identified herein (e.g., in Tables 1-4). For instance, as described above, mRNA expression can be monitored directly by hybridization of probes to the biosequences disclosed herein. Cell lines are exposed to the agent to be tested under appropriate conditions and time and total RNA or mRNA is isolated by standard procedures such those disclosed in Sambrook and Russell, 2001.

[0066] In some embodiments, cells or cell lines are first identified which express the gene products disclosed herein physiologically. Cell and/or cell lines so identified would be expected to comprise the necessary cellular machinery such that the fidelity of modulation of the transcriptional apparatus is maintained with regard to exogenous contact of agent with appropriate surface transduction mechanisms and/or the cytosolic cascades. Such cell lines can be, but are not required to be, derived from connective tissue, such as tendon. Further, such cells or cell lines can be transduced or transfected with an expression vehicle (e.g., a plasmid or viral vector) construct comprising an operable non-translated 5′-promoter containing end of the structural gene encoding the presently disclosed gene products fused to one or more antigenic fragments, which are peculiar to the presently disclosed gene products, wherein said fragments are under the transcriptional control of said promoter and are expressed as polypeptides whose molecular weight can be distinguished from the naturally occurring polypeptides or can further comprise an immunologically distinct tag. Such a process is known in the art (see Sambrook and Russell, 2001).

[0067] Cells or cell lines transduced or transfected as outlined above are then contacted with agents under appropriate conditions; for example, the agent comprises a pharmaceutically acceptable excipient and is contacted with cells comprised in an aqueous physiological buffer such as phosphate buffered saline (PBS) at physiological pH, Eagles balanced salt solution (BSS) at physiological pH, PBS or BSS comprising serum, or conditioned media comprising PBS or BSS and serum incubated at 37° C. These conditions can be modulated as deemed necessary by one of skill in the art. Subsequent to contacting the cells with the agent, said cells will be disrupted and the polypeptides of the lysate are fractionated such that a polypeptide fraction is pooled and contacted with an antibody to be further processed by immunological assay (e.g., ELISA, immunoprecipitation, or Western blot). The pool of proteins isolated from the “agent-contacted” sample can be compared with a control sample where only the excipient is contacted with the cells and an increase or decrease in the immunologically generated signal from the “agent-contacted” sample compared to the control can be used to distinguish the effectiveness of the agent.

[0068] In some embodiments, the presently disclosed subject matter provides methods for identifying agents that modulate the levels, concentration, or at least one activity of a protein(s) encoded by genes disclosed herein, such as in Tables 1-4. Such methods or assays can utilize any method of monitoring or detecting the desired activity.

[0069] In some embodiments, the relative amounts of a protein of the presently disclosed subject matter between a cell population that has been exposed to the agent to be tested compared to an unexposed control cell population can be assayed. In this format, probes such as specific antibodies are used to monitor the differential expression of the protein in the different cell populations. Cell lines or populations are exposed to the agent to be tested under appropriate conditions and time. Cellular lysates can be prepared from the exposed cell line or population and a control, unexposed cell line or population. The cellular lysates are then analyzed with the probe, such as a specific antibody.

[0070] Agents that are assayed in the above methods can be randomly selected or rationally selected or designed. As used herein, an agent is said to be randomly selected when the agent is chosen randomly without considering the specific sequences involved in the association of the a protein of the invention alone or with its associated substrates, binding partners, etc. An example of randomly selected agents is the use a chemical library or a peptide combinatorial library, or a growth broth of an organism.

[0071] As used herein, an agent is said to be rationally selected or designed when the agent is chosen on a nonrandom basis, which takes into account the sequence of the target site and/or its conformation in connection with the agent's action. Agents can be rationally selected or rationally designed by utilizing the peptide sequences that make up these sites.

[0072] For example, a rationally selected peptide agent can be a peptide comprising an amino acid sequence identical to or a derivative of any functional consensus site.

[0073] The agents of the presently disclosed subject matter can include, but are not limited to peptides, small molecules, vitamin derivatives, and carbohydrates. Dominant negative proteins, DNA encoding these proteins, antibodies to these proteins, peptide fragments of these proteins, and/or mimics of these proteins can be introduced into cells to affect function. “Mimic” as used herein refers to the modification of a region or several regions of a peptide molecule to provide a structure chemically different from the parent peptide but topographically and functionally similar to the parent peptide (see Grant 1995). A skilled artisan can readily recognize that there is no limit as to the structural nature of the agents of the presently disclosed subject matter.

[0074] II.E. Methods of Gene Expression Analysis

[0075] II.E.1. Assay Formats

[0076] The genes identified as being differentially expressed in, for example, tendon cells versus muscle cells, or in tendon cells under different genetic or environmental conditions, can be used in a variety of nucleic acid detection assays to detect or quantitate the expression level of a gene or multiple genes in a given sample. For example, Northern blotting, nuclease protection, RT-PCR (e.g., quantitative RT-PCR; QRT-PCR), and/or differential display methods can be used for detecting gene expression levels. In some embodiments, methods and assays of the presently disclosed subject matter are employed with array or chip hybridization-based methods for detecting the expression of a plurality of genes.

[0077] Any hybridization assay format can be used, including solution-based and solid support-based assay formats. Representative solid supports containing oligonucleotide probes for differentially expressed genes of the presently disclosed subject matter can be filters, polyvinyl chloride dishes, silicon, glass based chips, etc. Such wafers and hybridization methods are widely available and include, for example, those disclosed in PCT International Patent Application Publication WO 95/11755). Any solid surface to which oligonucleotides can be bound, either directly or indirectly, either covalently or non-covalently, can be used. An exemplary solid support is a high-density array or DNA chip. These contain a particular oligonucleotide probe in a predetermined location on the array. Each predetermined location can contain more than one molecule of the probe, but in some embodiments each molecule within the predetermined location has an identical sequence. Such predetermined locations are termed features. There can be any number of features on a single solid support including, for example, about 2, 10, 100, 1000, 10,000, 100,000, or 400,000 of such features on a single solid support. The solid support, or the area within which the probes are attached, can be of any convenient size (for example, on the order of a square centimeter).

[0078] Oligonucleotide probe arrays for differential gene expression monitoring can be made and employed according to any techniques known in the art (see e.g., Lockhart et al, 1996; McGall et al, 1996). Such probe arrays can contain at least two or more oligonucleotides that are complementary to or hybridize to two or more of the genes described herein. Such arrays can also contain oligonucleotides that are complementary or hybridize to at least about 2, 3, 4, 5, 6, 7, 8, 9, 10, 15, 20, 25, 30, 50, 70, 100, or more of the nucleic acid sequences disclosed herein.

[0079] The genes that are assayed according to the presently disclosed subject matter are typically in the form of RNA (e.g., total RNA or mRNA) or reverse transcribed RNA. The genes can be cloned or not, and the genes can be amplified or not. In some embodiments, poly A⁺ RNA is employed as a source.

[0080] The sequences of the expression marker genes disclosed herein are in the public databases and/or are disclosed in the Sequence Listing. Tables 1-4 provide the GENBANK® Accession Numbers for the nucleic acid sequences identified. The sequences of the genes in the GENBANK® database are expressly incorporated by reference as are equivalent and related sequences present in GENBANK® or other public databases. Also expressly incorporated herein by reference are all annotations present in the GENBANK® database associated with the sequences disclosed herein.

[0081] It is understood, for example, that although Tables 1-3 disclose nucleic acid sequences from mouse and Table 4 discloses nucleic acid sequences from human, the techniques disclosed herein can be used to detect differential expression of the genes disclosed in Tables 1-4 for any species. For example, Table 1 discloses that Annexin A8 (Anxa8) is expressed to an about 10 fold higher level in mouse Achilles tendon than in mouse gastrocnemius muscle. The nucleic acid sequence of a mouse Anxa8 gene product is disclosed as corresponding to GENBANK® Accession No. NM_{—}013473. However, when the subject is a human subject, it is understood that the expression level of the human ANXA8 gene would be assayed, and reagents that are capable of detecting expression of a human ANXA8 gene product (e.g., an RNA transcribed from, or a polypeptide encoded by, human ANXA8) would be designed based upon the nucleic acid and/or amino acid sequences of human ANXA8. It is further understood that the nucleic acid and amino acid sequences of these gene products are also publicly available, for example in the GENBANK® database (Accession Nos. NM_{—}001630 and NP_{—}001621, respectively), as are the nucleic acid and amino acid sequences of the genes listed in Tables 1-4 from several species other than human and mouse. As such, sequences corresponding to the GENBANK® database entries explicitly recited herein, as well as all sequences corresponding to orthologous sequences in other species that are also present in the GENBANK® database, are incorporated herein by reference.

[0082] Probes based on the sequences of the genes described herein can be prepared by any commonly available method. Oligonucleotide probes for assaying the tissue or cell sample are in some embodiments of sufficient length to specifically hybridize only to appropriate, complementary genes or transcripts. Typically, the oligonucleotide probes are at least 10, 12, 14, 16, 18, 20, or 25 nucleotides in length. In some embodiments, longer probes of at least 30, 40, 50, or 60 nucleotides are employed.

[0083] As used herein, oligonucleotide sequences that are complementary to one or more of the genes described herein are oligonucleotides that are capable of hybridizing under stringent conditions to at least part of the nucleotide sequence of said genes. Such hybridizable oligonucleotides will typically exhibit in some embodiments at least about 75% sequence identity, in some embodiments about 80% sequence identity, in some embodiments about 85% sequence identity, in some embodiments about 90% sequence identity, in some embodiments about 95% sequence identity, and in some embodiments greater than 95% sequence identity (e.g., 96%, 97%, 98%, 99%, or 100% sequence identity) at the nucleotide level to the nucleic acid sequences disclosed herein.

[0084] “Bind(s) substantially” refers to complementary hybridization between a probe nucleic acid and a target nucleic acid and embraces minor mismatches that can be accommodated by reducing the stringency of the hybridization media to achieve the desired detection of the target polynucleotide sequence.

[0085] The terms “background” or “background signal intensity” refer to hybridization signals resulting from non-specific binding, or other interactions, between the labeled target nucleic acids and components of the oligonucleotide array (e.g., the oligonucleotide probes, control probes, the array substrate, etc.). Background signals can also be produced by intrinsic fluorescence of the array components themselves. A single background signal can be calculated for the entire array, or a different background signal can be calculated for each target nucleic acid. In some embodiments, background is calculated as the average hybridization signal intensity for the lowest 5% to 10% of the probes in the array, or, where a different background signal is calculated for each target gene, for the lowest 5% to 10% of the probes for each gene. Of course, one of skill in the art will appreciate that where the probes to a particular gene hybridize well and thus appear to be specifically binding to a target sequence, they should not be used in a background signal calculation. Alternatively, background can be calculated as the average hybridization signal intensity produced by hybridization to probes that are not complementary to any sequence found in the sample (e.g., probes directed to nucleic acids of the opposite sense or to genes not found in the sample such as bacterial genes where the sample is mammalian nucleic acids). Background can also be calculated as the average signal intensity produced by regions of the array that lack any probes at all.

[0086] Assays and methods of the presently disclosed subject matter can utilize available formats to simultaneously screen in some embodiments at least about 10, in some embodiments at least about 50, in some embodiments at least about 100, in some embodiments at least about 1000, in some embodiments at least about 10,000, and in some embodiments at least about 40,000 or more different nucleic acid hybridizations.

[0087] The terms “mismatch control” and “mismatch probe” refer to a probe comprising a sequence that is deliberately selected not to be perfectly complementary to a particular target sequence. For each mismatch (MM) control in a high-density array there typically exists a corresponding perfect match (PM) probe that is perfectly complementary to the same particular target sequence. The mismatch can comprise one or more bases.

[0088] While the mismatch(s) can be located anywhere in the mismatch probe, terminal mismatches are less desirable as a terminal mismatch is less likely to prevent hybridization of the target sequence. In some embodiments, the mismatch is located at or near the center of the probe such that the mismatch is most likely to destabilize the duplex with the target sequence under the test hybridization conditions.

[0089] The phrase “perfect match probe” refers to a probe that has a sequence that is perfectly complementary to a particular target sequence. The test probe is typically perfectly complementary to a portion (subsequence) of the target sequence. The perfect match (PM) probe can be a “test probe”, a “normalization control” probe, an expression level control probe, or the like. A perfect match control or perfect match probe is, however, distinguished from a “mismatch control” or “mismatch probe”.

[0090] As used herein, a “probe” is defined as a nucleic acid that is capable of binding to a target nucleic acid of complementary sequence through one or more types of chemical bonds, usually through complementary base pairing, usually through hydrogen bond formation. As used herein, a probe can include natural (i.e., A, G, U, C, or T) or modified bases (7-deazaguanosine, inosine, etc.). In addition, the bases in probes can be joined by a linkage other than a phosphodiester bond, so long as it does not interfere with hybridization. Thus, probes can be peptide nucleic acids in which the constituent bases are joined by peptide bonds rather than phosphodiester linkages.

[0091] II.E.2. Probe Design

[0092] Upon review of the present disclosure, one of skill in the art will appreciate that an enormous number of array designs are suitable for the practice of the presently disclosed subject matter. The high-density array typically includes a number of probes that specifically hybridize to the sequences of interest. See PCT International Patent Application Publication WO 99/32660, incorporated herein be reference in its entirety, for methods of producing probes for a given gene or genes. In addition, in some embodiments, the array includes one or more control probes.

[0093] High-density array chips of the presently disclosed subject matter include in some embodiments “test probes”. Test probes can be oligonucleotides that in some embodiments range from about 5 to about 500 or about 5 to about 50 nucleotides, in some embodiments from about 10 to about 40 nucleotides, and in some embodiments from about 15 to about 40 nucleotides in length. In some embodiments, the probes are about 20 to 25 nucleotides in length. In some embodiments, test probes are double or single strand DNA sequences. DNA sequences are isolated or cloned from natural sources and/or amplified from natural sources using natural nucleic acid as templates. These probes have sequences complementary to particular subsequences of the genes whose expression they are designed to detect. Thus, the test probes are capable of specifically hybridizing to the target nucleic acid they are to detect.

[0094] In addition to test probes that bind the target nucleic acid(s) of interest, the high-density array can contain a number of control probes. The control probes fall into three categories referred to herein as (1) normalization controls; (2) expression level controls; and (3) mismatch controls.

[0095] Normalization controls are oligonucleotide or other nucleic acid probes that are complementary to labeled reference oligonucleotides or other nucleic acid sequences that are added to the nucleic acid sample. The signals obtained from the normalization controls after hybridization provide a control for variations in hybridization conditions, label intensity, “reading” efficiency and other factors that can cause the signal of a perfect hybridization to vary between arrays. In some embodiments, signals (e.g., fluorescence intensity) read from all other probes in the array are divided by the signal (e.g., fluorescence intensity) from the control probes, thereby normalizing the measurements.

[0096] Virtually any probe can serve as a normalization control. However, it is recognized that hybridization efficiency varies with base composition and probe length. Exemplary normalization probes can be selected to reflect the average length of the other probes present in the array; however, they can be selected to cover a range of lengths. The normalization control(s) can also be selected to reflect the (average) base composition of the other probes in the array; however, in some embodiments, only one or a few probes are used and they are selected such that they hybridize well (i.e., no secondary structure) and do not match any target-specific probes.

[0097] Expression level controls are probes that hybridize specifically with constitutively expressed genes in the biological sample. Virtually any constitutively expressed gene provides a suitable target for expression level controls. Typical expression level control probes have sequences complementary to subsequences of constitutively expressed “housekeeping genes” including, but not limited to, the β-actin gene, the transferrin receptor gene, the GAPDH gene, and the like.

[0098] Mismatch controls can also be provided for the probes to the target genes, for expression level controls or for normalization controls. Mismatch controls are oligonucleotide probes or other nucleic acid probes identical to their corresponding test or control probes except for the presence of one or more mismatched bases. A mismatched base is a base selected so that it is not complementary to the corresponding base in the target sequence to which the probe would otherwise specifically hybridize. One or more mismatches are selected such that under appropriate hybridization conditions (e.g., stringent conditions) the test or control probe would be expected to hybridize with its target sequence, but the mismatch probe would not hybridize (or would hybridize to a significantly lesser extent). In some embodiments, mismatch probes contain one or more central mismatches. Thus, for example, where a probe is a 20-mer, a corresponding mismatch probe will have the identical sequence except for a single base mismatch (e.g., substituting a G, a C, or a T for an A) at any of positions 6 through 14 (the central mismatch).

[0099] Mismatch probes thus provide a control for non-specific binding or cross hybridization to a nucleic acid in the sample other than the target to which the probe is directed. Mismatch probes also indicate whether a hybridization is specific or not. For example, if the target is present the perfect match probes should be consistently brighter than the mismatch probes. In addition, if all central mismatches are present, the mismatch probes can be used to detect a mutation. The difference in intensity between the perfect match and the mismatch probe (IBM)-I(MM)) provides a good measure of the concentration of the hybridized material.

[0100] II.E.3. Nucleic Acid Samples

[0101] A biological sample that can be analyzed in accordance with the presently disclosed subject matter comprises in some embodiments a nucleic acid. The terms “nucleic acid”, “nucleic acids”, and “nucleic acid molecules” each refer in some embodiments to deoxyribonucleotides, ribonucleotides, and polymers and folded structures thereof in either single- or double-stranded form. Nucleic acids can be derived from any source, including any organism. Deoxyribonucleic acids can comprise genomic DNA, cDNA derived from ribonucleic acid, DNA from an organelle (e.g., mitochondrial DNA or chloroplast DNA), or combinations thereof. Ribonucleic acids can comprise genomic RNA (e.g., viral genomic RNA), messenger RNA (mRNA), ribosomal RNA (rRNA), transfer RNA (tRNA), or combinations thereof.

[0102] II.E.3.i. Isolation of Nucleic Acid Samples

[0103] Nucleic acid samples used in the methods and assays of the presently disclosed subject matter can be prepared by any available method or process. Methods of isolating total mRNA are also known to those of skill in the art. For example, methods of isolation and purification of nucleic acids are described in detail in Chapter 3 of Tijssen 1993. Such samples include RNA samples, but also include cDNA synthesized from an mRNA sample isolated from a cell or tissue of interest. Such samples also include DNA amplified from the cDNA, an RNA transcribed from the amplified DNA, and combinations thereof. One of skill in the art would appreciate that it can be desirable to inhibit or destroy RNase present in homogenates before homogenates are used as a source of RNA.

[0104] The presently disclosed subject matter encompasses use of a sufficiently large biological sample to enable a comprehensive survey of low abundance nucleic acids in the sample. Thus, the sample can optionally be concentrated prior to isolation of nucleic acids. Several protocols for concentration have been developed that alternatively use slide supports (Kohsaka & Carson, 1994; Millar et al., 1995), filtration columns (Bej et al., 1991), or immunomagnetic beads (Albert et al., 1992; Chiodi et al., 1992). Such approaches can significantly increase the sensitivity of subsequent detection methods.

[0105] As one example, SEPHADEX® matrix (Sigma of St. Louis, Mo., United States of America) is a matrix of diatomaceous earth and glass suspended in a solution of chaotropic agents and has been used to bind nucleic acid material (Boom et al., 1990; Buffone et al., 1991). After the nucleic acid is bound to the solid support material, impurities and inhibitors are removed by washing and centrifugation, and the nucleic acid is then eluted into a standard buffer. Target capture also allows the target sample to be concentrated into a minimal volume, facilitating the automation and reproducibility of subsequent analyses (Lanciotti et al., 1992).

[0106] Methods for nucleic acid isolation can comprise simultaneous isolation of total nucleic acid, or separate and/or sequential isolation of individual nucleic acid types (e.g., genomic DNA, cDNA, organelle DNA, genomic RNA, mRNA, poly A⁺ RNA, rRNA, tRNA) followed by optional combination of multiple nucleic acid types into a single sample.

[0107] When RNA (e.g., mRNA) is selected for analysis, the disclosed methods allow for an assessment of gene expression in the tissue or cell type from which the RNA was isolated. RNA isolation methods are known to one of skill in the art. See Albert et al., 1992; Busch et al., 1992; Hamel et al., 1995; Herrewegh et al., 1995; Izraeli et al., 1991; McCaustland et al., 1991; Natarajan et al., 1994; Rupp et al., 1988; Tanaka et al., 1994; and Vankerckhoven et al., 1994. A representative procedure for RNA isolation from a clinical sample is set forth in Example 1.

[0108] Simple and semi-automated extraction methods can also be used for nucleic acid isolation, including for example, the SPLIT SECONDT™ system (Boehringer Mannheim of Indianapolis, Ind., United States of America), the TRIZOL™ Reagent system (Life Technologies of Gaithersburg, Md., United States of America), and the FASTPREP™ system (Bio 101 of La Jolla, Calif., United States of America). See also Smith 1998; and Paladichuk 1999.

[0109] In some embodiments, nucleic acids that are used for subsequent amplification and labeling are analytically pure as determined by spectrophotometric measurements or by visual inspection following electrophoretic resolution. In some embodiments, the nucleic acid sample is free of contaminants such as polysaccharides, proteins, and inhibitors of enzyme reactions. When a biological sample comprises an RNA molecule that is intended for use in producing a probe, it is preferably free of DNase and RNase. Contaminants and inhibitors can be removed or substantially reduced using resins for DNA extraction (e.g., CHELEX™ 100 from BioRad Laboratories of Hercules, Calif., United States of America) or by standard phenol extraction and ethanol precipitation.

[0110] II.E.3.ii. Amplification of Nucleic Acid Samples

[0111] In some embodiments, a nucleic acid isolated from a biological sample is amplified prior to being used in the methods disclosed herein. In some embodiments, the nucleic acid is an RNA molecule, which is converted to a complementary DNA (cDNA) prior to amplification. Techniques for the isolation of RNA molecules and the production of cDNA molecules from the RNA molecules are known (see generally, Silhavy et al., 1984; Sambrook & Russell, 2001; Ausubel et al., 2002; and Ausubel et al., 2003). In some embodiments, the amplification of RNA molecules isolated from a biological sample is a quantitative amplification (e.g., by quantitative RT-PCR).

[0112] The terms “template nucleic acid” and “target nucleic acid” as used herein each refer to nucleic acids isolated from a biological sample as described herein above. The terms “template nucleic acid pool”, “template pool”, “target nucleic acid pool”, and “target pool” each refer to an amplified sample of “template nucleic acid”. Thus, a target pool comprises amplicons generated by performing an amplification reaction using the template nucleic acid. In some embodiments, a target pool is amplified using a random amplification procedure as described herein.

[0113] The term “target-specific primer” refers to a primer that hybridizes selectively and predictably to a target sequence, for example a tendon-specific sequence, in a target nucleic acid sample. A target-specific primer can be selected or synthesized to be complementary to known nucleotide sequences of target nucleic acids.

[0114] The term “random primer” refers to a primer having an arbitrary sequence. The nucleotide sequence of a random primer can be known, although such sequence is considered arbitrary in that it is not specifically designed for complementarity to a nucleotide sequence of the presently disclosed subject matter. The term “random primer” encompasses selection of an arbitrary sequence having increased probability to be efficiently utilized in an amplification reaction. For example, the Random Oligonucleotide Construction Kit (ROCK) is a macro-based program that facilitates the generation and analysis of random oligonucleotide primers (Strain & Chmielewski, 2001). Representative primers include but are not limited to random hexamers and rapid amplification of polymorphic DNA (RAPD)-type primers as described by Williams et al., 1990.

[0115] A random primer can also be degenerate or partially degenerate as described by Telenius et al., 1992. Briefly, degeneracy can be introduced by selection of alternate oligonucleotide sequences that can encode a same amino acid sequence.

[0116] In some embodiments, random primers can be prepared by shearing or digesting a portion of the template nucleic acid sample. Random primers so-constructed comprise a sample-specific set of random primers.

[0117] The term “heterologous primer” refers to a primer complementary to a sequence that has been introduced into the template nucleic acid pool. For example, a primer that is complementary to a linker or adaptor, as described below, is a heterologous primer. Representative heterologous primers can optionally include a poly(dT) primer, a poly(T) primer, or as appropriate, a poly(dA) or poly(A) primer.

[0118] The term “primer” as used herein refers to a contiguous sequence comprising in some embodiments about 6 or more nucleotides, in some embodiments about 10-20 nucleotides (e.g., 15-mer), and in some embodiments about 20-30 nucleotides (e.g., a 22-mer). Primers used to perform the methods of the presently disclosed subject matter encompass oligonucleotides of sufficient length and appropriate sequence so as to provide initiation of polymerization on a nucleic acid molecule.

[0119] U.S. Pat. No. 6,066,457 to Hampson et al. describes a method for substantially uniform amplification of a collection of single stranded nucleic acid molecules such as RNA. Briefly, the nucleic acid starting material is anchored and processed to produce a mixture of directional shorter random size DNA molecules suitable for amplification of the sample.

[0120] In accordance with the methods of the presently disclosed subject matter, any PCR technique or related technique can be employed to perform the step of amplifying the nucleic acid sample. In addition, such methods can be optimized for amplification of a particular subset of nucleic acid (e.g., genomic DNA versus RNA), and representative optimization criteria and related guidance can be found in the art. See Cha & Thilly, 1993; Linz et al., 1990; Robertson & Walsh-Weller, 1998; Roux 1995; Williams 1989; and McPherson et al., 1995.

[0121] II.E.3.iii. Labeling of Nucleic Acid Samples

[0122] Optionally, a nucleic acid sample (e.g., a quantitatively amplified RNA sample) further comprises a detectable label. In some embodiments of the presently disclosed subject matter, the amplified nucleic acids can be labeled prior to hybridization to an array. Alternatively, randomly amplified nucleic acids are hybridized with a set of probes, without prior labeling of the amplified nucleic acids. For example, an unlabeled nucleic acid in the biological sample can be detected by hybridization to a labeled probe. In some embodiments, both the randomly amplified nucleic acids and the one or more pathogen-specific probes include a label, wherein the proximity of the labels following hybridization enables detection. An exemplary procedure using nucleic acids labeled with chromophores and fluorophores to generate detectable photonic structures is described in U.S. Pat. No. 6,162,603 to Heller.

[0123] In accordance with the methods of the presently disclosed subject matter, the amplified nucleic acids or pathogen-specific probes/probe sets can be labeled using any detectable label. It will be understood to one of skill in the art that any suitable method for labeling can be used, and no particular detectable label or technique for labeling should be construed as a limitation of the disclosed methods.

[0124] Direct labeling techniques include incorporation of radioisotopic or fluorescent nucleotide analogues into nucleic acids by enzymatic synthesis in the presence of labeled nucleotides or labeled PCR primers. A radio-isotopic label can be detected using autoradiography or phosphorimaging. A fluorescent label can be detected directly using emission and absorbance spectra that are appropriate for the particular label used. Any detectable fluorescent dye can be used, including but not limited to FITC (fluorescein isothiocyanate), FLUOR X™, ALEXA FLUOR® 488, OREGON GREEN® 488, 6-JOE (6-carboxy-4′,5′-dichloro-2′,7′-dimethoxyfluorescein, succinimidyl ester), ALEXA FLUOR® 532, Cy3, ALEXA FLUOR® 546, TMR (tetramethylrhodamine), ALEXA FLUOR® 568, ROX (X-rhodamine), ALEXA FLUOR® 594, TEXAS RED®, BODIPY® 630/650, and Cy5 (available from Amersham Pharmacia Biotech of Piscataway, N.J., United States of America or from Molecular Probes Inc. of Eugene, Oreg., United States of America). Fluorescent tags also include sulfonated cyanine dyes (available from Li-Cor, Inc. of Lincoln, Nebr., United States of America) that can be detected using infrared imaging. Methods for direct labeling of a heterogeneous nucleic acid sample are known in the art and representative protocols can be found in, for example, DeRisi et al., 1996; Sapolsky & Lipshutz, 1996; Schena et al., 1995; Schena et al., 1996; Shalon et al., 1996; Shoemaker et al., 1996; and Wang et al., 1998.

[0125] In some embodiments, nucleic acid molecules isolated from different cell types and/or cell types from different genetic and/or environmental backgrounds are labeled with different detectable markers, allowing the nucleic acids to analyzed simultaneously on an array. For example, as disclosed in EXAMPLE 1, a first RNA sample (e.g., mouse Achilles tendon (AT) RNAs) can be reverse transcribed into cDNAs labeled with cyanine 3 (a green dye fluorophore; Cy3) while a second RNA sample to which the first RNA sample is to be compared (e.g., gastrocnemius muscle (GM) RNAs) can be labeled with cyanine 5 (a red dye fluorophore; Cy5).

[0126] The quality of probe or nucleic acid sample labeling can be approximated by determining the specific activity of label incorporation. For example, in the case of a fluorescent label, the specific activity of incorporation can be determined by the absorbance at 260 nm and 550 nm (for Cy3) or 650 nm (for Cy5) using published extinction coefficients (Randolph & Waggoner, 1995). Very high label incorporation (specific activities of >1 fluorescent molecule/20 nucleotides) can result in a decreased hybridization signal compared with probe with lower label incorporation. Very low specific activity (<1 fluorescent molecule/100 nucleotides) can give unacceptably low hybridization signals. See Worley et al., 2000. Thus, it will be understood to one of skill in the art that labeling methods can be optimized for performance in microarray hybridization assay, and that optimal labeling can be unique to each label type.

[0127] II.E.4. Forming High-Density Arrays

[0128] In some embodiments of the presently disclosed subject matter, probes or probe sets are immobilized on a solid support such that a position on the support identifies a particular probe or probe set. In the case of a probe set, constituent probes of the probe set can be combined prior to placement on the solid support or by serial placement of constituent probes at a same position on the solid support.

[0129] A microarray can be assembled using any suitable method known to one of skill in the art, and any one microarray configuration or method of construction is not considered to be a limitation of the presently disclosed subject matter. Representative microarray formats that can be used in accordance with the methods of the presently disclosed subject matter are described herein below and include, but are not limited to light-directed chemical coupling, and mechanically directed coupling (see U.S. Pat. Nos. 5,143,854 to Pirrung et al.; 5,800,992 to Fodor et al.; and 5,837,832 to Chee et al.).

[0130] II.E.4.i. Array Substrate and Configuration

[0131] The substrate for printing the array should be substantially rigid and amenable to DNA immobilization and detection methods (e.g., in the case of fluorescent detection, the substrate must have low background fluorescence in the region of the fluorescent dye excitation wavelengths). The substrate can be nonporous or porous as determined most suitable for a particular application. Representative substrates include but are not limited to a glass microscope slide, a glass coverslip, silicon, plastic, a polymer matrix, an agar gel, a polyacrylamide gel, and a membrane, such as a nylon, nitrocellulose or ANAPORE™ (Whatman of Maidstone, United Kingdom) membrane.

[0132] Porous substrates (membranes and polymer matrices) are preferred in that they permit immobilization of relatively large amount of probe molecules and provide a three-dimensional hydrophilic environment for biomolecular interactions to occur (Dubiley et al., 1997; Yershov et al., 1996). A BIOCHIP ARRAYER™ dispenser (Packard Instrument Company of Meriden, Conn., United States of America) can effectively dispense probes onto membranes such that the spot size is consistent among spots whether one, two, or four droplets were dispensed per spot (Englert 2000).

[0133] A microarray substrate for use in accordance with the methods of the presently disclosed subject matter can have either a two-dimensional (planar) or a three-dimensional (non-planar) configuration. An exemplary three-dimensional microarray is the FLOW-THRU™ chip (Gene Logic, Inc. of Gaithersburg, Md., United States of America), which has implemented a gel pad to create a third dimension. Such a three-dimensional microarray can be constructed of any suitable substrate, including glass capillary, silicon, metal oxide filters, or porous polymers. See Yang et al., 1998.

[0134] Briefly, a FLOW-THRU™ chip (Gene Logic, Inc.) comprises a uniformly porous substrate having pores or microchannels connecting upper and lower faces of the chip. Probes are immobilized on the walls of the microchannels and a hybridization solution comprising sample nucleic acids can flow through the microchannels. This configuration increases the capacity for probe and target binding by providing additional surface relative to two-dimensional arrays. See U.S. Pat. No. 5,843,767 to Beattie.

[0135] II.E.4.ii. Surface Chemistry

[0136] The particular surface chemistry employed is inherent in the microarray substrate and substrate preparation. Probe immobilization of nucleic acids probes post-synthesis can be accomplished by various approaches, including adsorption, entrapment, and covalent attachment. Typically, the binding technique is designed to not disrupt the activity of the probe.

[0137] For substantially permanent immobilization, covalent attachment is generally performed. Since few organic functional groups react with an activated silica surface, an intermediate layer is advisable for substantially permanent probe immobilization. Functionalized organosilanes can be used as such an intermediate layer on glass and silicon substrates (Liu & Hlady, 1996; Shriver-Lake 1998). A hetero-bifunctional cross-linker requires that the probe have a different chemistry than the surface, and is preferred to avoid linking reactive groups of the same type. A representative hetero-bifunctional cross-linker comprises gamma-maleimidobutyryloxy-succimide (GMBS) that can bind maleimide to a primary amine of a probe. Procedures for using such linkers are known to one of skill in the art and are summarized by Hermanson 1990. A representative protocol for covalent attachment of DNA to silicon wafers is described by O'Donnell et al., 1997.

[0138] When using a glass substrate, the glass should be substantially free of debris and other deposits and have a substantially uniform coating. Pretreatment of slides to remove organic compounds that can be deposited during their manufacture can be accomplished, for example, by washing in hot nitric acid. Cleaned slides can then be coated with 3-aminopropyltrimethoxysilane using vapor-phase techniques. After silane deposition, slides are washed with deionized water to remove any silane that is not attached to the glass and to catalyze unreacted methoxy groups to cross-link to neighboring silane moieties on the slide. The uniformity of the coating can be assessed by known methods, for example electron spectroscopy for chemical analysis (ESCA) or ellipsometry (Ratner & Castner, 1997; Schena et al., 1995). See also Worley et al., 2000.

[0139] For attachment of probes greater than about 300 base pairs, noncovalent binding is suitable. A representative technique for noncovalent linkage involves use of sodium isothiocyanate (NaSCN) in the spotting solution. When using this method, amino-silanized slides are typically employed because this coating improves nucleic acid binding when compared to bare glass. This method works well for spotting applications that use about 100 ng/μl (Worley et al., 2000).

[0140] In the case of nitrocellulose or nylon membranes, the chemistry of nucleic acid binding chemistry to these membranes has been well characterized (Southern 1975; Sambrook and Russell, 2001).

[0141] II.E.4.iii. Arraying Techniques

[0142] A microarray for the detection of pathogens in a biological sample can be constructed using any one of several methods available in the art, including but not limited to photolithographic and microfluidic methods, further described herein below. In some embodiments, the method of construction is flexible, such that a microarray can be tailored for a particular purpose.

[0143] As is standard in the art, a technique for making a microarray should create consistent and reproducible spots. Each spot is preferably uniform, and appropriately spaced away from other spots within the configuration. A solid support for use in the presently disclosed subject matter comprises in some embodiments about 10 or more spots, in some embodiments about 100 or more spots, in some embodiments about 1,000 or more spots, and in some embodiments about 10,000 or more spots. In some embodiments, the volume deposited per spot is about 10 picoliters to about 10 nanoliters, and in some embodiments about 50 picoliters to about 500 picoliters. The diameter of a spot is in some embodiments about 50 μm to about 1000 μm, and in some embodiments about 100 μm to about 250 μm.

[0144] Light-directed synthesis. This technique was developed by Fodor et al. (Fodor et al., 1991; Fodor et al., 1993), and commercialized by Affymetrix of Santa Clara, Calif., United States of America. Briefly, the technique uses precision photolithographic masks to define the positions at which single, specific nucleotides are added to growing single-stranded nucleic acid chains. Through a stepwise series of defined nucleotide additions and light-directed chemical linking steps, high-density arrays of defined oligonucleotides are synthesized on a solid substrate. A variation of the method, called Digital Optical Chemistry, employs mirrors to direct light synthesis in place of photolithographic masks (PCT International Patent Application Publication No. WO 99/63385). This approach is generally limited to probes of about 25 nucleotides in length or less. See also Warrington et al., 2000.

[0145] Contact Printing. Several procedures and tools have been developed for printing microarrays using rigid pin tools. In surface contact printing, the pin tools are dipped into a sample solution, resulting in the transfer of a small volume of fluid onto the tip of the pins. Touching the pins or pin samples onto a microarray surface leaves a spot, the diameter of which is determined by the surface energies of the pin, fluid, and microarray surface. Typically, the transferred fluid comprises a volume in the nanoliter or picoliter range.

[0146] One common contact printing technique uses a solid pin replicator. A replicator pin is a tool for picking up a sample from one stationary location and transporting it to a defined location on a solid support. A typical configuration for a replicating head is an array of solid pins, generally in an 8×12 format, spaced at 9-mm centers that are compatible with 96- and 384-well plates. The pins are dipped into the wells, lifted, moved to a position over the microarray substrate, lowered to touch the solid support, whereby the sample is transferred. The process is repeated to complete transfer of all the samples. See Maier et al., 1994. A recent modification of solid pins involves the use of solid pin tips having concave bottoms, which print more efficiently than flat pins in some circumstances. See Rose 2000.

[0147] Solid pins for microarray printing can be purchased, for example, from TeleChem International, Inc. of Sunnyvale, Calif. in a wide range of tip dimensions. The CHIPMAKER™ and STEALTH™ pins from TeleChem contain a stainless steel shaft with a fine point. A narrow gap is machined into the point to serve as a reservoir for sample loading and spotting. The pins have a loading volume of 0.2 μl to 0.6 μl to create spot sizes ranging from 75 μm to 360 μm in diameter.

[0148] To permit the printing of multiple arrays with a single sample loading, quill-based array tools, including printing capillaries, tweezers, and split pins have been developed. These printing tools hold larger sample volumes than solid pins and therefore allow the printing of multiple arrays following a single sample loading. Quill-based arrayers withdraw a small volume of fluid into a depositing device from a microwell plate by capillary action. See Schena et al., 1995. The diameter of the capillary typically ranges from about 10 μm to about 100 μm. A robot then moves the head with quills to the desired location for dispensing. The quill carries the sample to all spotting locations, where a fraction of the sample is deposited. The forces acting on the fluid held in the quill must be overcome for the fluid to be released. Accelerating and then decelerating by impacting the quill on a microarray substrate accomplishes fluid release. When the tip of the quill hits the solid support, the meniscus is extended beyond the tip and transferred onto the substrate. Carrying a large volume of sample fluid minimizes spotting variability between arrays. Because tapping on the surface is required for fluid transfer, a relatively rigid support, for example a glass slide, is appropriate for this method of sample delivery.

[0149] A variation of the pin printing process is the PIN-AND-RING™ technique developed by Genetic MicroSystems Inc. of Woburn, Mass., United States of America. This technique involves dipping a small ring into the sample well and removing it to capture liquid in the ring. A solid pin is then pushed through the sample in the ring, and the sample trapped on the flat end of the pin is deposited onto the surface. See Mace et al., 2000. The PIN-AND-RING™ technique is suitable for spotting onto rigid supports or soft substrates such as agar, gels, nitrocellulose, and nylon. A representative instrument that employs the PIN-AND-RING™ technique is the 417™ Arrayer available from Affymetrix of Santa Clara, Calif., United States of America.

[0150] Additional procedural considerations relevant to contact printing methods, including array layout options, print area, print head configurations, sample loading, preprinting, microarray surface properties, sample solution properties, pin velocity, pin washing, printing time, reproducibility, and printing throughput are known in the art, and are summarized by Rose 2000.

[0151] Noncontact Ink-Jet Printing. A representative method for noncontact ink-jet printing uses a piezoelectric crystal closely apposed to the fluid reservoir. One configuration places the piezoelectric crystal in contact with a glass capillary that holds the sample fluid. The sample is drawn up into the reservoir and the crystal is biased with a voltage, which causes the crystal to deform, squeeze the capillary, and eject a small amount of fluid from the tip. Piezoelectric pumps offer the capability of controllable, fast jetting rates and consistent volume deposition. Most piezoelectric pumps are unidirectional pumps that need to be directly connected, for example by flexible capillary tubing, to a source of sample supply or wash solution. The capillary and jet orifices should be of sufficient inner diameter so that molecules are not sheared. The void volume of fluid contained in the capillary typically ranges from about 100 μl to about 500 μl and generally is not recoverable. See U.S. Pat. No. 5,965,352 to Stoughton & Friend.

[0152] Devices that provide thermal pressure, sonic pressure, or oscillatory pressure on a liquid stream or surface can also be used for ink-jet printing. See Theriault et al., 1999.

[0153] Syringe-Solenoid Printing. Syringe-solenoid technology combines a syringe pump with a microsolenoid valve to provide quantitative dispensing of nanoliter sample volumes. A high-resolution syringe pump is connected to both a high-speed microsolenoid valve and a reservoir through a switching valve. For printing microarrays, the system is filled with a system fluid, typically water, and the syringe is connected to the microsolenoid valve. Withdrawing the syringe causes the sample to move upward into the tip. The syringe then pressurizes the system such that opening the microsolenoid valve causes droplets to be ejected onto the surface. With this configuration, a minimum dispense volume is on the order of 4 nl to 8 nl. The positive displacement nature of the dispensing mechanism creates a substantially reliable system. See U.S. Pat. Nos. 5,743,960 and 5,916,524, both to Tisone.

[0154] Electronic Addressing. This method involves placing charged molecules at specific positions on a blank microarray substrate, for example a NANOCHIP™ substrate (Nanogen Inc. of San Diego, Calif., United States of America). A nucleic acid probe is introduced to the microchip, and the negatively-charged probe moves to the selected charged position, where it is concentrated and bound. Serial application of different probes can be performed to assemble an array of probes at distinct positions. See U.S. Pat. No. 6,225,059 to Ackley et al. and PCT International Patent Application Publication No. WO 01/23082.

[0155] Nanoelectrode Synthesis. An alternative array that can also be used in accordance with the methods of the presently disclosed subject matter provides ultra small structures (nanostructures) of a single or a few atomic layers synthesized on a semiconductor surface such as silicon. The nanostructures can be designed to correspond precisely to the three-dimensional shape and electrochemical properties of molecules, and thus can be used to recognize nucleic acids of a particular nucleotide sequence. See U.S. Pat. No. 6,123,819 to Peeters.

[0156] In brief, the light-directed combinatorial synthesis of oligonucleotide arrays on a glass surface proceeds using automated phosphoramidite chemistry and chip masking techniques. In some embodiments, a glass surface is derivatized with a silane reagent containing a functional group, e.g., a hydroxyl or amine group blocked by a photolabile protecting group. Photolysis through a photolithogaphic mask is used selectively to expose functional groups that are then ready to react with incoming 5′ photoprotected nucleoside phosphoramidites. The phosphoramidites react only with those sites that are illuminated (and thus exposed by removal of the photolabile blocking group). Thus, the phosphoramidites only add to those areas selectively exposed from the preceding step. These steps are repeated until the desired array of sequences has been synthesized on the solid surface. Combinatorial synthesis of different oligonucleotide analogues at different locations on the array is determined by the pattern of illumination during synthesis and the order of addition of coupling reagents.

[0157] In addition to the foregoing, other methods that can be used to generate an array of oligonucleotides on a single substrate are described in PCT International Patent Application Publication WO 93/09668. High-density nucleic acid arrays can also be fabricated by depositing pre-made and/or natural nucleic acids in predetermined positions. Synthesized or natural nucleic acids are deposited on specific locations of a substrate by light directed targeting and oligonucleotide directed targeting. A dispenser that moves from region to region to deposit nucleic acids in specific spots can also be employed.

[0158] II.E.5. Hybridization

[0159] II.E.5.i. General Considerations

[0160] The terms “specifically hybridizes” and “selectively hybridizes” each refer to binding, duplexing, or hybridizing of a molecule only to a particular nucleotide sequence under stringent conditions when that sequence is present in a complex nucleic acid mixture (e.g., total cellular DNA or RNA).

[0161] The phrase “substantially hybridizes” refers to complementary hybridization between a probe nucleic acid molecule and a substantially identical target nucleic acid molecule as defined herein. Substantial hybridization is generally permitted by reducing the stringency of the hybridization conditions using art-recognized techniques.

[0162] “Stringent hybridization conditions” and “stringent hybridization wash conditions” in the context of nucleic acid hybridization experiments are both sequence- and environment-dependent. Longer sequences hybridize specifically at higher temperatures. Generally, highly stringent hybridization and wash conditions are selected to be about 5° C. lower than the thermal melting point (Tₘ) for the specific sequence at a defined ionic strength and pH. The Tₘ is the temperature (under defined ionic strength and pH) at which 50% of the target sequence hybridizes to a perfectly matched probe. Very stringent conditions are selected to be equal to the Tₘ for a particular probe. Typically, under “stringent conditions” a probe hybridizes specifically to its target sequence, but to no other sequences.

[0163] An extensive guide to the hybridization of nucleic acids is found in Tijssen 1993. In general, a signal to noise ratio of 2-fold (or higher) than that observed for a negative control probe in a same hybridization assay indicates detection of specific or substantial hybridization.

[0164] II.E.5.ii. Hybridization on a Solid Support

[0165] In some embodiments of the presently disclosed subject matter, an amplified and/or labeled nucleic acid sample is hybridized to specific probes or probe sets that are immobilized on a continuous solid support comprising a plurality of identifying positions. Representative formats of such solid supports are described herein.

[0166] The following are examples of hybridization and wash conditions that can be used to clone homologous nucleotide sequences that are substantially identical to reference nucleotide sequences of the presently disclosed subject matter: a probe nucleotide sequence hybridizes in one example to a target nucleotide sequence in 7% sodium dodecyl sulfate (SDS), 0.5M NaPO₄, 1 mm ethylene diamine tetraacetic acid (EDTA), 1% BSA at 50° C. followed by washing in 2×SSC, 0.1% SDS at 50° C.; in another example, a probe and target sequence hybridize in 7% SDS, 0.5 M NaPO₄, 1 mm EDTA, 1% BSA at 50° C. followed by washing in 1×SSC, 0.1% SDS at 50° C.; in another example, a probe and target sequence hybridize in 7% SDS, 0.5 M NaPO₄, 1 mm EDTA, 1% BSA at 50° C. followed by washing in 0.5×SSC, 0.1% SDS at 50° C.; in another example, a probe and target sequence hybridize in 7% SDS, 0.5 M NaPO₄, 1 mm EDTA, 1% BSA at 50° C. followed bywashing in 0.1×SSC, 0.1% SDS at 50° C.; in yet another example, a probe and target sequence hybridize in 7% SDS, 0.5 M NaPO₄, 1 mm EDTA, 1% BSA at 50° C. followed by washing in 0.1×SSC, 0.1% SDS at 65° C. In some embodiments, hybridization conditions comprise hybridization in a roller tube for at least 12 hours at 42° C. In each of the above conditions, the sodium phosphate hybridization buffer can be replaced by a hybridization buffer comprising 6×SSC (or 6×SSPE), 5×Denhardt's reagent, 0.5% SDS, and 100 g/ml carrier DNA, including 0-50% formamide, with hybridization and wash temperatures chosen based upon the desired stringency. Other hybridization and wash conditions are known to those of skill in the art (see also Sambrook and Russell, 2001; Ausubel et al., 2002; and Ausubel et al., 2003; each of which is incorporated herein in its entirety). As is known in the art, the addition of formamide in the hybridization solution reduces the Tₘ by about 0.4° C. Thus, high stringency conditions include the use of any of the above solutions and 0% formamide at 65° C., or any of the above solutions plus 50% formamide at 42° C.

[0167] For some high-density glass-based microarray experiments, hybridization at 65° C. is too stringent for typical use, at least in part because the presence of fluorescent labels destabilizes the nucleic acid duplexes (Randolph & Waggoner, 1997). Alternatively, hybridization can be performed in a formamide-based hybridization buffer as described in Piétu et al., 1996.

[0168] A microarray format can be selected for use based on its suitability for electrochemical-enhanced hybridization. Provision of an electric current to the microarray, or to one or more discrete positions on the microarray facilitates localization of a target nucleic acid sample near probes immobilized on the microarray surface. Concentration of target nucleic acid near arrayed probe accelerates hybridization of a nucleic acid of the sample to a probe. Further, electronic stringency control allows the removal of unbound and nonspecifically bound DNA after hybridization. See U.S. Pat. Nos. 6,017,696 to Heller and 6,245,508 to Heller and Sosnowski.

[0169] II.E.5.iii. Hybridization in Solution

[0170] In some embodiments of the presently disclosed subject matter, an amplified and/or labeled nucleic acid sample is hybridized to one or more probes in solution. Representative stringent hybridization conditions for complementary nucleic acids having more than about 100 complementary residues are overnight hybridization in 50% formamide with 1 mg of heparin at 42° C. An example of highly stringent wash conditions is 15 minutes in 0.1×SSC, 5 M NaCl at 65° C. An example of stringent wash conditions is 15 minutes in 0.2×SSC buffer at 65° C. (see Sambrook and Russell, 2001, for a description of SSC buffer). A high stringency wash can be preceded by a low stringency wash to remove background probe signal. An example of medium stringency wash conditions for a duplex of more than about 100 nucleotides, is 15 minutes in 1×SSC at 45° C. An example of low stringency wash for a duplex of more than about 100 nucleotides, is 15 minutes in 4-6×SSC at 40° C. Stringent conditions can also be achieved with the addition of destabilizing agents such as formamide.

[0171] For short probes (e.g., about 10 to 50 nucleotides), stringent conditions typically involve salt concentrations of less than about 1M Na⁺ ion, typically about 0.01 M to 1 M Na⁺ ion concentration (or other salts) at pH 7.0-8.3, and the temperature is typically at least about 30° C.

[0172] Optionally, nucleic acid duplexes or hybrids can be captured from the solution for subsequent analysis, including detection assays. For example, in a simple assay, a single pathogen-specific probe set is hybridized to an amplified and labeled RNA sample derived from a target nucleic acid sample. Following hybridization, an antibody that recognizes DNA:RNA hybrids is used to precipitate the hybrids for subsequent analysis. The presence of the pathogen is determined by detection of the label in the precipitate.

[0173] Alternate capture techniques can be used as will be understood to one of skill in the art, for example, purification by a metal affinity column when using probes comprising a histidine tag. As another example, the hybridized sample can be hydrolyzed by alkaline treatment wherein the double-stranded hybrids are protected while non-hybridizing single-stranded template and excess probe are hydrolyzed. The hybrids are then collected using any nucleic acid purification technique for further analysis.

[0174] To assess the expression of multiple genes and/or samples from multiple different sources simultaneously, probes or probe sets can be distinguished by differential labeling of probes or probe sets. Alternatively, probes or probe sets can be spatially separated in different hybridization vessels.

[0175] In some embodiments, a probe or probe set having a unique label is prepared for each gene or source to be detected. For example, a first probe or probe set can be labeled with a first fluorescent label, and a second probe or probe set can be labeled with a second fluorescent label. Multi-labeling experiments should consider label characteristics and detection techniques to optimize detection of each label. Representative first and second fluorescent labels are Cy3 and Cy5 (Amersham Pharmacia Biotech of Piscataway, New Jersey, United States of America), which can be analyzed with good contrast and minimal signal leakage.

[0176] A unique label for each probe or probe set can further comprise a labeled microsphere to which a probe or probe set is attached. A representative system is LabMAP (Luminex Corporation of Austin, Tex., United States of America). Briefly, LabMAP (Laboratory Multiple Analyte Profiling) technology involves performing molecular reactions, including hybridization reactions, on the surface of color-coded microscopic beads called microspheres. When used in accordance with the methods of the presently disclosed subject matter, an individual pathogen-specific probe or probe set is attached to beads having a single color-code such that they can be identified throughout the assay. Successful hybridization is measured using a detectable label of the amplified nucleic acid sample, wherein the detectable label can be distinguished from each color-code used to identify individual microspheres. Following hybridization of the randomly amplified, labeled nucleic acid sample with a set of microspheres comprising pathogen-specific probe sets, the hybridization mixture is analyzed to detect the signal of the color-code as well as the label of a sample nucleic acid bound to the microsphere. See Vignali 2000; Smith et al., 1998; and PCT International Patent Application Publication Nos. WO 01/13120; WO 01/14589; WO 99/19515; WO 99/32660; and WO 97/14028.

[0177] II.E.6. Detection

[0178] Methods for detecting hybridization are typically selected according to the label employed.

[0179] In the case of a radioactive label (e.g., ³²P-dNTP) detection can be accomplished by autoradiography or by using a phosphorimager as is known to one of skill in the art. In some embodiments, a detection method can be automated and is adapted for simultaneous detection of numerous samples.

[0180] Common research equipment has been developed to perform high-throughput fluorescence detecting, including instruments from GSI Lumonics (Watertown, Mass., United States of America), Amersham Pharmacia Biotech/Molecular Dynamics (Sunnyvale, Calif., United States of America), Applied Precision Inc. (Issauah, Wash., United States of America), Genomic Solutions Inc. (Ann Arbor, Mich., United States of America), Genetic MicroSystems Inc. (Woburn, Mass., United States of America), Axon (Foster City, Calif., United States of America), Hewlett Packard (Palo Alto, Calif., United States of America), and Virtek (Woburn, Mass., United States of America). Most of the commercial systems use some form of scanning technology with photomultiplier tube detection. Criteria for consideration when analyzing fluorescent samples are summarized by Alexay et al., 1996.

[0181] In some embodiments, a nucleic acid sample or probe is labeled with far infrared, near infrared, or infrared fluorescent dyes. Following hybridization, the mixture of nucleic acids and probes is scanned photoelectrically with a laser diode and a sensor, wherein the laser scans with scanning light at a wavelength within the absorbance spectrum of the fluorescent label, and light is sensed at the emission wavelength of the label. See U.S. Pat. Nos. 6,086,737 to Patonay et al.; 5,571,388 to Patonav et al.; 5,346,603 to Middendorf & Brumbaugh; 5,534,125 to Middendorf et al.; 5,360,523 to Middendorf et al.; 5,230,781 to Middendorf & Patonay; 5,207,880 to Middendorf & Brumbaugh; and 4,729,947 to Middendorf & Brumbaugh. An ODYSSEY™ infrared imaging system (Li-Cor, Inc. of Lincoln, Nebr., United States of America) can be used for data collection and analysis.

[0182] If an epitope label has been used, a protein or compound that binds the epitope can be used to detect the epitope. For example, an enzyme-linked protein can be subsequently detected by development of a calorimetric or luminescent reaction product that is measurable using a spectrophotometer or luminometer, respectively.

[0183] In some embodiments, INVADER® technology (Third Wave Technologies of Madison, Wis., United States of America) is used to detect target nucleic acid/probe complexes. Briefly, a nucleic acid cleavage site (such as that recognized by a variety of enzymes having 5′ nuclease activity) is created on a target sequence, and the target sequence is cleaved in a site-specific manner, thereby indicating the presence of specific nucleic acid sequences or specific variations thereof. See U.S. Pat. Nos. 5,846,717 to Brow et al.; 5,985,557 to Prudent et al.; 5,994,069 to Hall et al.; 6,001,567 to Brow et al.; and 6,090,543 to Prudent et al.

[0184] In some embodiments, target nucleic acid/probe complexes are detected using an amplifying molecule, for example a poly-dA oligonucleotide as described by Lisle et al., 2001. Briefly, a tethered probe is employed against a target nucleic acid having a complementary nucleotide sequence. A target nucleic acid having a poly-dT sequence, which can be added to any nucleic acid sequence using methods known to one of skill in the art, hybridizes with an amplifying molecule comprising a poly-dA oligonucleotide. Short oligo-dT₄₀ signaling moieties are labeled with any suitable label (e.g., fluorescent, chemiluminescent, radioisotopic labels). The short oligo-dT₄₀ signaling moieties are subsequently hybridized along the molecule, and the label is detected.

[0185] The presently disclosed subject matter also envisions use of electrochemical technology for detecting a nucleic acid hybrid according to the disclosed method. In this case, the detection method relies on the inherent properties of DNA, and thus a detectable label on the target sample or the probe/probe set is not required. In some embodiments, probe-coupled electrodes are multiplexed to simultaneously detect multiple genes using any suitable microarray or multiplexed liquid hybridization format. To enable detection, gene-specific and control probes are synthesized with substitution of the non-physiological nucleic acid base inosine for guanine, and subsequently coupled to an electrode. Following hybridization of a nucleic acid sample with probe-coupled electrodes, a soluble redox-active mediator (e.g., ruthenium 2,2′-bipyridine) is added, and a potential is applied to the sample. In the absence of guanine, each mediator is oxidized only once. However, when a guanine-containing nucleic acid is present, by virtue of hybridization of a sample nucleic acid molecule to the probe, a catalytic cycle is created that results in the oxidation of guanine and a measurable current enhancement. See U.S. Pat. Nos. 6,127,127 to Eckhardt et al.; 5,968,745 to Thorp et al.; and 5,871,918 to Thorp et al.

[0186] Surface plasmon resonance spectroscopy can also be used to detect hybridization. See e.g., Heaton et al., 2001; Nelson et al., 2001; and Guedon et al., 2000.

[0187] II.E.7. Data Analysis

[0188] Databases and software designed for use with use with microarrays is discussed in U.S. Pat. No. 6,229,911 to Balaban & Aggarwal, a computer-implemented method for managing information, stored as indexed tables, collected from small or large numbers of microarrays, and U.S. Pat. No. 6,185,561 to Balaban & Khurgin, a computer-based method with data mining capability for collecting gene expression level data, adding additional attributes and reformatting the data to produce answers to various queries. U.S. Pat. No. 5,974,164 to Chee, disclose a software-based method for identifying mutations in a nucleic acid sequence based on differences in probe fluorescence intensities between wild type and mutant sequences that hybridize to reference sequences.

[0189] Analysis of microarray data can also be performed using the method disclosed in Tusher et al., 2001, which describes the Significance Analysis of Microarrays (SAM) method for determining significant differences in gene expression among two or more samples.

[0190] II.F. Profiles

[0191] Once an expression level is determined for a gene, a profile can be created. As used herein, the term “profile” (e.g., a “gene expression profile”) refers to a repository of the expression level data that can be used to compare the expression levels of different genes among various subjects. For example, for a given subject, the term “profile” can encompass the expression levels of all genes detected in whatever units (as described herein above) are chosen.

[0192] The term “profile” is also intended to encompass manipulations of the expression level data derived from a subject. For example, once relative expression levels are determined for a given set of genes in a subject, the relative expression levels for that subject can be compared to a standard to determine if the expression levels in that subject are higher or lower than for the same genes in the standard. Standards can include any data deemed to be relevant for comparison.

[0193] In some embodiments, a standard is prepared by determining the average expression level of a gene in a normal population, a normal population being defined as subjects that do not have connective tissue disease and/or injury. In some embodiments, a standard is prepared by determining the average expression level of a gene in a population of subjects that do have a connective tissue disease and/or injury. In some embodiments, a standard is prepared by determining the average expression level of a gene in the population as a whole (i.e. subjects are grouped together irrespective of connective tissue disease and/or injury status). In some embodiments, a standard is prepared by determining the average expression level of a gene in a normal population, the average expression level of a gene in an population of subjects with connective tissue disease and/or injury, adding those two values, and dividing the sum by two to determine the midpoint of the average expression in these populations. In this latter embodiment, a profile for a “new” subject can be compared to the standard, and the profile can further comprise data indicating whether for each gene, the expression level in the new subject is higher or lower than the expression level of that gene in the standard.

[0194] For example, a new subject's profile can comprise a score of “1” for each gene for which the expression in the subject is higher than in the standard, and a score of “0” for each gene for which the expression in the subject is lower than in the standard. In this way, a profile can comprise an overall “score”, the score being defined as the sum total of all the ones and zeroes present in the profile. These scores can then be used to in the methods disclosed herein to diagnose, detect the progression of, and/or monitor a treatment in the new subject. It is understood that the use of 1s and 0s is exemplary only, and any convenient value can be assigned in the practice of the methods of the presently claimed subject matter.

### III. KITS

[0195] The presently disclosed subject matter further includes kits comprising, in different combinations, high-density oligonucleotide arrays and reagents for use with the arrays. The kits can be used, for example, to predict or model the toxic response of a test compound, to monitor the progression of disease states, to identify genes that show promise as new drug targets, and to screen known and newly designed drugs as potential therapeutics.

[0196] In some embodiments, a kit comprises a plurality of reagents that can be used to detect expression levels for one or more (e.g., 1, 2, 3, 4, 5, 6, 7, 8, 9, 10, 15, 20, 25, 50, or more) of genes disclosed herein, such as in Tables 1-4. For example, a kit comprises a plurality of reagents that can be used to detect expression levels for in some embodiments at least five and in some embodiments at least 10 of genes disclosed herein, such as in Tables 1-4. In some embodiments, the plurality of reagents comprise one or more (e.g., 1, 5, 10, or more) oligonucleotide pairs, each pair of which can be employed to specifically amplify one of the genes listed herein, such as in Tables 1-4. In some embodiments, a kit comprises an array comprising one or more oligonucleotides attached thereto that specifically binds to a gene product (e.g., an RNA or a cDNA derived therefrom) from one or more of the genes listed herein, such as in Tables 1-4. In some embodiments, the solid support comprises one or more oligonucleotides that specifically binds to a product of a control gene and/or the kit comprises at least one oligonucleotide pair that can be employed to specifically amplify a product from a control gene, wherein the phrase “control gene” refers to a gene the expression of which is known or suspected of not being differentially expressed in the samples being analyzed. Representative control genes include the so-called “housekeeping genes”, a listing of which is disclosed in Su et al., 2003 (19 Trends in Genetics 362-365), incorporated herein by reference in its entirety.

[0197] The kits can be employed in the pharmaceutical industry, where the need for early drug testing is strong due to the high costs associated with drug development, but where bioinformatics, in particular gene expression informatics related to tendon cells, is still lacking. These kits will reduce the costs, time and risks associated with traditional new drug screening using cell cultures and laboratory animals. The results of large-scale drug screening of pre-grouped patient populations, pharmacogenomics testing, can also be applied to select drugs with greater efficacy and fewer side-effects. The kits can also be used by smaller biotechnology companies and research institutes that do not have the facilities for performing such large-scale testing themselves.

### EXAMPLES

[0198] The following Examples have been included to illustrate modes of the presently disclosed subject matter. In light of the present disclosure and the general level of skill in the art, those of skill will appreciate that the following Examples are intended to be exemplary only and that numerous changes, modifications, and alterations can be employed without departing from the scope of the presently disclosed subject matter.

### General Materials and Methods for Examples 1-4

[0199] Production and Labeling of cDNA. RNA was purified using Qiagen columns (Qiagen Inc., Valencia, Calif., United States of America). RNA was eluted with water and stored in ethanol at −80° C. Samples were reconstituted in water and the quality of the RNA checked by separation in an acrylamide gel with a ratio comparison of 18 to 28S rRNA bands (acceptable RNA preparations had a 28S:18S intensity ratio of at least about 2:1).

[0200] RNA was then prepared for a reverse transcriptase reaction using random hexamers to prepare cDNAs. A first sample of RNAs from one tissue or cell type was reverse transcribed into cDNAs using dCTP labeled with Cyanine 3 (a green dye fluorophore; Cy3) as the control dye while a second sample of RNAs from a second tissue or cell type was reverse transcribed using dCTP labeled with cyanine 5 (a red dye fluorophore; Cy5).

[0201] Hybridization of Samples to Microarrays. cDNAs from the first sample or the second sample were pooled in equal proportions then hybridized with arrayed DNA sequences. Arrays that were employed were the Agilent Whole Mouse Genome Oligo Microarray Kit (Product No. G4122A; Agilent Technologies, Inc., Palo Alto, Calif., United States of America) for mouse cells and tissues, and a microarray produced by the University of North Carolina at Chapel Hill's Microarray Database Facility. ARRAYASSIST® software (available from Stratagene, La Jolla, Calif., United States of America) was used for expression analysis. The hybridizations and washes were performed according to the procedures disclosed in the Agilent Technologies, Inc. “Two-Color Microarray Based Gene Expression Analysis” Manual.

[0202] Hybridized arrays were then imaged and fluorescence quantitation was made for each dye and each spot according to the Agilent Technologies, Inc. “Two-Color Microarray Based Gene Expression Analysis” Manual. The ratio of fluorescence intensities for red and green for each spot was proportional to the relative abundance of each cDNA in the target specimens.

[0203] Statistical Analysis. The Significance Analysis of Microarrays (SAM) method of Tusher et al., 2001 was employed for determining significant differences in gene expression among two or more samples.

### Example 1

### Comparisons of the Tendon and Muscle Transcriptomes

[0204] Gastrocnemious muscle and Achilles tendon tissues were collected at their anatomic midpoints with separate sterile instruments and pooled from 6 wild type (wt) mice (E129 genetic background) weighing 26 g and immediately frozen in liquid N₂. Tissues were thawed and mechanically homogenized in TRIZOL® (Invitrogen Corporation, Carlsbad, Calif., United States of America). Nucleic acids were extracted, precipitated, and the samples subjected to DNase treatment. RNA was purified using Qiagen columns (Qiagen Inc., Valencia, Calif., United States of America).

[0205] RNA was isolated and reverse transcribed as described above in General Materials and Methods. Mouse Achilles tendon (AT) RNAs were reverse transcribed into cDNAs labeled with Cyanine 3 (a green dye fluorophore; Cy3) as the control dye while gastrocnemius muscle (GM) RNAs were labeled with cyanine 5 (a red dye fluorophore; Cy5). cDNAs from AT or GM were pooled in equal proportions then hybridized with arrayed DNA sequences using the Agilent chip. Hybridized arrays were then imaged and fluorescence quantitation was made for each dye and each spot.

[0206] Approximately 41,000 genes were assessed with the Agilent Whole Mouse Genome Oligo Microarray Kit (Product No. G4122A; Agilent Technologies, Inc., Palo Alto, Calif., United States of America) comparing tendon and muscle expression levels that were graded as positive. The data presented in Table 1 show the genes expressed for which at least a 4-fold difference in expression level was observed between tendon and muscle. For instance, given a minimum of a 4-fold difference in gene expression as a baseline to determine differences, about 100 genes were expressed more in tendon than muscle, nineteen at 8 fold, and seven at 16 fold. ARRAYASSIST® software (available from Stratagene, La Jolla, Calif., United States of America) was used for expression analysis. Of these seven genes that had an expression level that differed at least 16 fold between tendon and muscle, five of had names attributed to them by the microarray manufacturer.

[0207] Surprisingly, genes that were most highly expressed in tendon compared to muscle were loricrin and other keratins. Other highly expressed genes included a several procollagens, fibronectin 1, secreted phosphoprotein 1 (Sppl), several cartilage-related genes (e.g., cartilage intermediate layer protein 2 (Cilp2) and cartilage oligomeric matrix protein (Comp)), and proteoglycan 4, among others.

TABLE 1
Comparison of Gene Expression Levels Between Wild Type Mouse Gastrocnemius Muscle and Achilles Tendon^{a}

| | | | | | | | |
|---|---|---|---|---|---|---|---|
| | | SEQ | Experi- | Experiment | Experiment | | |
| Agilent ID No. | NAME^{b} | ID NO. | ment A | B | C | Mean | STDEV |

A. Genes More Highly Expressed by at Least Two-fold in Gastrocnemius Muscle than Achilles Tendon

| | | | | | | | |
|---|---|---|---|---|---|---|---|
| A_51_P199168 | Cell death-inducing DNA fragmentation factor, alpha subunit- | 1 | 4.3150 | 4.6950 | −1.8540 | 2.3853 | 3.6763 |
| | like effector A Cidea NM_007702 | | | | | | |
| A_51_P194099 | Thyroid hormone responsive SPOT14 homolog (Rattus) Thrsp | 2 | 2.8080 | 3.6780 | 0.3690 | 2.2850 | 1.7154 |
| | NM_009381 | | | | | | |
| A_52_P347176 | cDNA sequence BC034068 BC034068 | 3 | 3.0830 | 2.8980 | 0.6060 | 2.1957 | 1.3798 |
| A_52_P260346 | Hemoglobin, beta adult major chain Hbb-b1 NM_008220 | 4 | 1.4950 | 2.2570 | 1.7620 | 1.8380 | 0.3866 |
| A_51_P264695 | Crystallin, mu Crym NM_016669 | 5 | 1.8780 | 1.7380 | 1.4790 | 1.6983 | 0.2024 |
| A_51_P374476 | Hemoglobin, beta adult major chain Hbb-b1 NM_008220 | 4 | 1.5960 | 1.6530 | 1.7560 | 1.6683 | 0.0811 |
| A_52_P266643 | RIKEN cDNA 9630033F20 gene 9630033F20Rik NM_177003 | 6 | 1.3110 | 1.9960 | 1.6930 | 1.6667 | 0.3433 |
| A_51_P521010 | Protein phosphatase 1, regulatory (inhibitor) subunit 3C | 7 | 1.4460 | 2.0760 | 1.2470 | 1.5897 | 0.4328 |
| | Ppp1r3c NM_016854 | | | | | | |
| A_52_P208681 | Hemoglobin alpha, adult chain 1 Hba-a1 M10466 | 8 | 1.7360 | 1.5400 | 1.4890 | 1.5883 | 0.1304 |
| A_52_P346113 | Forkhead box N2 Foxn2 NM_180974 | 9 | 0.7200 | 2.1760 | 1.7990 | 1.5650 | 0.7557 |
| A_51_P233597 | Resistin Retn NM_022984 | 10 | 2.3040 | 2.1800 | 0.1880 | 1.5573 | 1.1875 |
| A_51_P137125 | Myosin binding protein H Mybph NM_016749 | 11 | 0.9340 | 1.7750 | 1.9290 | 1.5460 | 0.5356 |
| A_52_P470017 | RIKEN cDNA 2310032D16 gene 2310032D16Rik NM_028802 | 12 | 1.2160 | 1.2080 | 2.1920 | 1.5387 | 0.5658 |
| A_51_P137121 | Myosin binding protein H Mybph NM_016749 | 11 | 1.2190 | 1.8010 | 1.5860 | 1.5353 | 0.2943 |
| A_51_P464791 | RIKEN cDNA 2310032D16 gene 2310032D16Rik NM_028802 | 12 | 1.2830 | 1.1230 | 2.1860 | 1.5307 | 0.5731 |
| A_52_P320553 | TIGR Accession No. TC1515832 | 13 | 0.8790 | 2.0350 | 1.6440 | 1.5193 | 0.5880 |
| A_51_P374468 | Hemoglobin, beta adult major chain Hbb-b1 NM_008220 | 14 | 1.2810 | 1.4060 | 1.8500 | 1.5123 | 0.2990 |
| A_51_P321126 | Fatty acid synthase Fasn NM_007988 | 15 | 2.5150 | 2.4760 | −0.5110 | 1.4933 | 1.7359 |
| A_52_P492062 | ENSEMBL Accession No. ENSMUST0000000505 | 16 | 1.2920 | 1.8120 | 1.3730 | 1.4923 | 0.2798 |
| A_52_P278538 | Hemoglobin alpha, adult chain 1 Hba-a1 NM_008218 | 17 | 1.3260 | 1.7010 | 1.4400 | 1.4890 | 0.1922 |
| A_52_P467128 | RIKEN cDNA 4933434E20 gene 4933434E20Rik NM_027500 | 18 | 0.5820 | 1.8600 | 2.0160 | 1.4860 | 0.7868 |
| A_51_P250217 | Phosphoenolpyruvate carboxykinase 1, cytosolic Pck1 | 19 | 2.5840 | 2.4160 | −0.6290 | 1.4570 | 1.8085 |
| | NM_011044 | | | | | | |
| A_52_P82991 | ENSEMBL Accession No. ENSMUST00000050537 | 20 | 1.0240 | 1.6640 | 1.6380 | 1.4420 | 0.3622 |
| A_52_P602147 | Myosin, heavy polypeptide 4, skeletal muscle Myh4 | 21 | 0.9550 | 1.7160 | 1.6240 | 1.4317 | 0.4154 |
| | NM_010855 | | | | | | |
| A_52_P344376 | Eukaryotic translation initiation factor 4A2 Eif4a2 NM_013506 | 22 | 0.8890 | 1.4970 | 1.8830 | 1.4230 | 0.5011 |
| A_51_P489452 | Cysteine dioxygenase 1, cytosolic Cdo1 NM_033037 | 23 | 2.3810 | 2.5530 | −0.6910 | 1.4143 | 1.8253 |
| A_51_P267986 | Cytosolic ovarian carcinoma antigen 1 Cova1 NM_145951 | 24 | 1.0730 | 1.4080 | 1.7550 | 1.4120 | 0.3410 |
| A_52_P127682 | Neural stem cell-derived dendrite regulator Nsddr AK129183 | 25 | 0.9560 | 1.1200 | 2.1500 | 1.4087 | 0.6472 |
| A_52_P654534 | Orthodenticle homolog 3 (Drosophila) Otx3 NM_130865 | 26 | 0.9850 | 1.2920 | 1.8440 | 1.3737 | 0.4353 |
| A_52_P323044 | High mobility group box 1 Hmgb1 NM_010439 | 27 | 0.9220 | 1.6120 | 1.5860 | 1.3733 | 0.3911 |
| A_52_P317346 | RIKEN cDNA D330025O06 gene D330025O06Rik AK084656 | 28 | 0.9550 | 1.5810 | 1.4920 | 1.3427 | 0.3387 |
| A_52_P679105 | Protease, serine, 23 Prss23 NM_029614 | 29 | 0.9840 | 0.8970 | 2.1310 | 1.3373 | 0.6887 |
| A_52_P655842 | Ankyrin 1, erythroid Ank1 NM_031158 | 30 | 0.6760 | 1.8460 | 1.4800 | 1.3340 | 0.5985 |
| A_52_P475825 | RIKEN cDNA 1110032D12 gene 1110032D12Rik NM_019770 | 31 | 0.4690 | 1.7280 | 1.8030 | 1.3333 | 0.7495 |
| A_52_P513347 | Phosphorylase kinase beta Phkb NM_199446 | 32 | 1.3770 | 1.4420 | 1.1720 | 1.3303 | 0.1409 |
| A_52_P5420 | Mitochondrial ribosomal protein S23 Mrps23 NM_024174 | 33 | 1.3630 | 1.2520 | 1.3590 | 1.3247 | 0.0630 |
| A_51_P235835 | RIKEN cDNA 2310061N23 gene D12Ertd647e AK075797 | 34 | 1.4040 | 1.8450 | 0.6950 | 1.3147 | 0.5802 |
| A_51_P114094 | Calsyntenin 3 Clstn3 NM_153508 | 35 | 2.3000 | 2.2920 | −0.6690 | 1.3077 | 1.7118 |
| A_52_P484807 | S-adenosylmethionine decarboxylase 1 Amd1 NM_009665 | 36 | 0.9650 | 1.0000 | 1.9360 | 1.3003 | 0.5508 |
| A_52_P224104 | Calmodulin 1 Calm1 NM_009790 | 37 | 0.5590 | 2.1990 | 1.1410 | 1.2997 | 0.8314 |
| A_52_P213909 | Hemoglobin, beta adult major chain Hbb-b1 NM_008220 | 14 | 1.1520 | 1.0120 | 1.7280 | 1.2973 | 0.3795 |
| A_52_P48569 | Solute carrier family 38, member 4 Slc38a4 NM_027052 | 38 | 1.1690 | 0.9600 | 1.7580 | 1.2957 | 0.4138 |
| A_51_P307624 | Phosphorylase kinase beta Phkb NM_199446 | 32 | 1.1800 | 1.5600 | 1.0870 | 1.2757 | 0.2506 |
| A_51_P198045 | RAB28, member RAS oncogene family Rab28 AK012286 | 39 | 0.4530 | 2.2100 | 1.1630 | 1.2753 | 0.8839 |
| A_52_P568895 | Potassium voltage-gated channel, shaker-related subfamily, | 40 | 0.8690 | 0.8550 | 2.0960 | 1.2733 | 0.7125 |
| | beta member 1 Kcnab1 NM_010597 | | | | | | |
| A_52_P101454 | Cardiomyopathy associated 5 Cmya5 AJ575748 | 41 | 0.4850 | 1.8890 | 1.4320 | 1.2687 | 0.7161 |
| A_52_P34806 | Karyopherin (importin) alpha 3 Kpna3 NM_008466 | 42 | 1.0010 | 1.0220 | 1.7770 | 1.2667 | 0.4421 |
| A_51_P452779 | Liver glycogen phosphorylase Pygl NM_133198 | 43 | 2.3090 | 2.2190 | −0.7310 | 1.2657 | 1.7297 |
| A_52_P677822 | Transmembrane protein 5 Tmem5 NM_153059 | 44 | 1.0280 | 1.4560 | 1.2940 | 1.2593 | 0.2161 |
| A_52_P89683 | Similar to L-lactate dehydrogenase A chain (LDH-A) (LDH | 45 | 0.6710 | 1.6600 | 1.4390 | 1.2567 | 0.5191 |
| | muscle subunit) (LDH-M) XM_358191 | | | | | | |
| A_51_P145404 | Tubulin, alpha 3 Tuba3 NM_009446 | 46 | 1.1400 | 1.2570 | 1.3680 | 1.2550 | 0.1140 |
| A_51_P471520 | Serine/threonine kinase 25 (yeast) Stk25 NM_021537 | 47 | 0.2820 | 1.7640 | 1.7130 | 1.2530 | 0.8413 |
| A_52_P278311 | Phosphorylase kinase alpha 1 Phka1 NM_008832 | 48 | 1.0860 | 1.6900 | 0.9790 | 1.2517 | 0.3834 |
| A_52_P411716 | Polymerase (DNA directed), eta (RAD 30 related) Polh | 49 | 0.6460 | 1.5380 | 1.5460 | 1.2433 | 0.5173 |
| | BC049159 | | | | | | |
| A_52_P55972 | Resistin Retn NM_022984 | 10 | 1.7590 | 2.2290 | −0.3020 | 1.2287 | 1.3463 |
| A_51_P338072 | Myosin, heavy polypeptide 4, skeletal muscle Myh4 | 21 | 1.0610 | 0.9400 | 1.6470 | 1.2160 | 0.3781 |
| | NM_010855 | | | | | | |
| A_52_P680710 | Karyopherin (importin) alpha 3 Kpna3 NM_008466 | 42 | 1.0320 | 1.1420 | 1.4690 | 1.2143 | 0.2273 |
| A_51_P352782 | Protein kinase C, epsilon Prkce AK017901 | 50 | 0.8870 | 1.2760 | 1.4760 | 1.2130 | 0.2995 |
| A_52_P142143 | Junctophilin 2 Jph2 BC022635 | 51 | 0.7320 | 2.2460 | 0.6580 | 1.2120 | 0.8962 |
| A_51_P519189 | Eukaryotic translation initiation factor 3, subunit 2 (beta) Eif3s2 | 52 | 0.6330 | 2.0880 | 0.9110 | 1.2107 | 0.7724 |
| | NM_018799 | | | | | | |
| A_51_P335583 | Sperm associated antigen 7 Spag7 NM_172561 | 53 | 0.4560 | 1.8730 | 1.2810 | 1.2033 | 0.7117 |
| A_51_P366672 | Solute carrier family 36 (proton/amino acid symporter), member | 54 | 2.1430 | 1.6550 | −0.1960 | 1.2007 | 1.2339 |
| | 2 Slc36a2 NM_153170 | | | | | | |
| A_51_P347862 | Actinin, alpha 1 Actn1 NM_134156 | 55 | 1.1740 | 1.7060 | 0.7130 | 1.1977 | 0.4969 |
| A_52_P480044 | Agilent Accession No. A_52_P480044 | | 0.5990 | 1.3150 | 1.6790 | 1.1977 | 0.5495 |
| A_51_P255657 | RIKEN cDNA 2210011C24 gene 2210011C24Rik AK008705 | 56 | 0.9680 | 1.0300 | 1.5160 | 1.1713 | 0.3001 |
| A_52_P16419 | Glycerol-3-phosphate dehydrogenase 1 (soluble) Gpd1 | 57 | 1.1800 | 1.3140 | 1.0000 | 1.1647 | 0.1576 |
| | NM_010271 | | | | | | |
| A_52_P171033 | RIKEN cDNA 1110007A13 gene 1110007A13Rik NM_145955 | 58 | 0.7990 | 1.8290 | 0.8570 | 1.1617 | 0.5787 |
| A_52_P402897 | Cadherin 4 Cdh4 AK049087 | 59 | 0.8290 | 1.1610 | 1.4820 | 1.1573 | 0.3265 |
| A_51_P108408 | 2,3-bisphosphoglycerate mutase Bpgm NM_007563 | 60 | 0.8580 | 1.6650 | 0.9190 | 1.1473 | 0.4493 |
| A_52_P592909 | Diacylglycerol O-acyltransferase 2 Dgat2 NM_026384 | 61 | 1.7220 | 1.8240 | −0.1070 | 1.1463 | 1.0866 |
| A_51_P436596 | Rabphilin 3A Rph3a NM_011286 | 62 | 0.8930 | 1.3310 | 1.2070 | 1.1437 | 0.2258 |
| A_52_P490032 | Ras-related GTP binding D C030003H22Rik Rragd | 63 | 0.5410 | 1.6440 | 1.2440 | 1.1430 | 0.5584 |
| | NM_027491 | | | | | | |
| A_52_P359739 | Diacylglycerol O-acyltransferase 2 Dgat2 NM_026384 | 64 | 1.5920 | 1.9140 | −0.0840 | 1.1407 | 1.0727 |
| A_52_P636038 | Parkin Park2 NM_016694 | 65 | 0.4080 | 1.8040 | 1.2020 | 1.1380 | 0.7002 |
| A_51_P143296 | Myosin, heavy polypeptide 8, skeletal muscle, perinatal Myh8 | 66 | 0.9770 | 1.3240 | 1.1070 | 1.1360 | 0.1753 |
| | NM_177369 | | | | | | |
| A_51_P380807 | Creatine kinase, muscle Ckm NM_007710 | 67 | 0.8980 | 1.4120 | 1.0960 | 1.1353 | 0.2592 |
| A_51_P116137 | Leucine-rich repeats and immunoglobulin-like domains 1 Lrig1 | 68 | 0.6260 | 1.4210 | 1.3330 | 1.1267 | 0.4358 |
| | NM_008377 | | | | | | |
| A_51_P266861 | Malic enzyme, supernatant Mod1 NM_008615 | 69 | 0.7820 | 1.0920 | 1.5060 | 1.1267 | 0.3632 |
| A_51_P225048 | Zinc finger, RAN-binding domain containing 1 Zranb1 | 70 | 0.6350 | 1.3990 | 1.3460 | 1.1267 | 0.4266 |
| | AJ250693 | | | | | | |
| A_51_P339200 | HLA-B associated transcript 5 Bat5 NM_178592 | 71 | 0.2780 | 1.8400 | 1.2550 | 1.1243 | 0.7892 |
| A_51_P499020 | Fructose bisphosphatase 2 Fbp2 NM_007994 | 72 | 1.2310 | 1.5550 | 0.5740 | 1.1200 | 0.4998 |
| A_51_P336827 | RIKEN cDNA 1810044O22 gene 1810044O22Rik NM_025558 | 73 | 1.1270 | 1.3840 | 0.8460 | 1.1190 | 0.2691 |
| A_52_P1157979 | Calmodulin 3 Calm3 NM_007590 | 74 | 0.4590 | 1.5850 | 1.2980 | 1.1140 | 0.5851 |
| A_51_P486512 | LETM1 domain containing 1 Letmd1 NM_134093 | 75 | 1.5500 | 1.5110 | 0.2770 | 1.1127 | 0.7240 |
| A_52_P2659 | ENSEMBL Accession No. ENSMUST00000059414 | 76 | 1.0250 | 1.2850 | 1.0110 | 1.1070 | 0.1543 |
| A_51_P483617 | RIKEN cDNA 0610040J01 gene 0610040J01Rik NM_029554 | 77 | 0.7220 | 0.6480 | 1.9510 | 1.1070 | 0.7319 |
| A_52_P507393 | ADP-ribosylation factor-like 10C Arl10c NM_026011 | 78 | 0.8740 | 1.8480 | 0.5910 | 1.1043 | 0.6594 |
| A_52_P436238 | Ornithine decarboxylase, structural 1 Odc1 NM_013614 | 79 | 0.5600 | 0.6020 | 2.1420 | 1.1013 | 0.9015 |
| A_52_P399054 | RIKEN cDNA 1110032D12 gene 1110032D12Rik NM_019770 | 31 | 0.3560 | 1.0230 | 1.9150 | 1.0980 | 0.7822 |
| A_52_P350554 | Potassium voltage gated channel, Shab-related subfamily, | 80 | 0.9560 | 1.5170 | 0.8170 | 1.0967 | 0.3706 |
| | member 1 Kcnb1 NM_008420 | | | | | | |
| A_52_P415047 | Olfactory receptor 973 Olfr973 NM_146613 | 81 | 0.8080 | 1.3530 | 1.1230 | 1.0947 | 0.2736 |
| A_52_P454950 | Ubiquitin-conjugating enzyme E2B, RAD6 homology | 82 | 1.0080 | 0.9170 | 1.3580 | 1.0943 | 0.2328 |
| | (S. cerevisiae) Ube2b NM_009458 | | | | | | |
| A_51_P445417 | RIKEN cDNA 4930571C24 gene 4930571C24Rik AK019803 | 83 | 1.1670 | 1.0950 | 1.0140 | 1.0920 | 0.0765 |
| A_52_P306744 | Tetraspanin 8 Tspan8 NM_146010 | 84 | 1.1430 | 0.5390 | 1.5710 | 1.0843 | 0.5185 |
| A_51_P204486 | RIKEN cDNA 1200009I06 gene 1200009I06Rik NM_028807 | 85 | 0.8900 | 1.0400 | 1.3220 | 1.0840 | 0.2193 |
| A_52_P1139966 | 10 days neonate cerebellum cDNA, RIKEN full-length enriched | 86 | 0.6760 | 1.0300 | 1.5340 | 1.0800 | 0.4312 |
| | library, clone: B930015L22 product: unknown EST, full insert | | | | | | |
| | sequence AK047066 | | | | | | |
| A_52_P315988 | RIKEN cDNA 0610010D24 gene 0610010D24Rik BC043115 | 87 | 0.7330 | 1.5520 | 0.9490 | 1.0780 | 0.4245 |
| A_51_P418765 | Selenophosphate synthetase 2 Sephs2 NM_009266 | 88 | 0.6790 | 1.0720 | 1.4750 | 1.0753 | 0.3980 |
| A_51_P364140 | Lactate dehydrogenase 1, A chain Ldh1 NM_010699 | 89 | 0.7390 | 0.7870 | 1.6960 | 1.0740 | 0.5392 |
| A_52_P151211 | Homer homolog 1 (Drosophila) Homer1 NM_152134 | 90 | 0.8850 | 1.2980 | 1.0380 | 1.0737 | 0.2088 |
| A_52_P474379 | TIGR Accession No. TC1497215 | 91 | 0.8690 | 0.7180 | 1.6340 | 1.0737 | 0.4911 |
| A_52_P409498 | Tubulin, alpha 4 Tuba4 NM_009447 | 92 | 0.4610 | 1.3710 | 1.3880 | 1.0733 | 0.5304 |
| A_52_P385606 | Creatine kinase, brain Ckb NM_021273 | 93 | 0.8160 | 1.4270 | 0.9660 | 1.0697 | 0.3184 |
| A_52_P485542 | Homeo box D8 Hoxd8 XM_355338 | 94 | 1.1010 | 1.5140 | 0.5920 | 1.0690 | 0.4618 |
| A_51_P149872 | Potassium voltage-gated channel, shaker-related subfamily, | 95 | 0.8070 | 1.4440 | 0.9520 | 1.0677 | 0.3339 |
| | member 7 Kcna7 NM_010596 | | | | | | |
| A_52_P176999 | RIKEN cDNA 9830147e 9830147 NM_177238 | 96 | 0.6980 | 1.3360 | 1.1690 | 1.0677 | 0.3309 |
| A_51_P507023 | RIKEN cDNA C630002B14 gene C630002B14Rik | 97 | 0.7080 | 0.8060 | 1.6800 | 1.0647 | 0.5351 |
| | NM_175331 | | | | | | |
| A_51_P284937 | G elongation factor Gfm1 NM_138591 | 98 | 0.4890 | 1.7460 | 0.9480 | 1.0610 | 0.6361 |
| A_51_P268559 | Isocitrate dehydrogenase 3 (NAD+) alpha Idh3a NM_029573 | 99 | 0.9290 | 1.3700 | 0.8700 | 1.0563 | 0.2732 |
| A_51_P164504 | Apolipoprotein C-I Apoc1 NM_007469 | 100 | 2.3760 | 2.1700 | −1.3870 | 1.0530 | 2.1156 |
| A_51_P450957 | Actin, alpha 2, smooth muscle, aorta Acta2 NM_007392 | 101 | 0.6080 | 0.9020 | 1.6430 | 1.0510 | 0.5333 |
| A_52_P85152 | RIKEN cDNA 5730439E10 gene 5730439E10Rik NM_175324 | 102 | 0.6090 | 1.5810 | 0.9620 | 1.0507 | 0.4920 |
| | NM_175324 | | | | | | |
| A_52_P594894 | Cell division cycle 34 homolog (S. cerevisiae) Cdc34 | 103 | 0.7030 | 0.9980 | 1.4430 | 1.0480 | 0.3725 |
| | NM_177613 | | | | | | |
| A_52_P26161 | Pentaxin related gene Ptx3 NM_008987 | 104 | 0.6870 | 1.3070 | 1.1470 | 1.0470 | 0.3219 |
| A_51_P316993 | ADP-ribosylation factor-like 6 interacting protein 2 Arl6ip2 | 105 | 0.7380 | 1.3680 | 1.0150 | 1.0403 | 0.3158 |
| | NM_019717 | | | | | | |
| A_52_P532910 | Tropomyosin 1, alpha Tpm1 NM_024427 | 106 | 1.1320 | 1.3240 | 0.6590 | 1.0383 | 0.3423 |
| A_51_P145735 | Acylphosphatase 1, erythrocyte (common) type Acyp1 | 107 | 0.8340 | 0.7740 | 1.5020 | 1.0367 | 0.4041 |
| | NM_025421 | | | | | | |
| A_52_P58024 | Similar to ALY LOC544730 XM_282933 | 108 | 0.9710 | 1.1430 | 0.9900 | 1.0347 | 0.0943 |
| A_52_P421133 | Branched chain ketoacid dehydrogenase E1, alpha polypeptide | 109 | 0.6260 | 1.2220 | 1.2540 | 1.0340 | 0.3537 |
| | Bckdha NM_007533 | | | | | | |
| A_52_P279557 | F-box protein 40 Fbxo40 AK036684 | 110 | 0.6180 | 1.8700 | 0.6060 | 1.0313 | 0.7263 |
| A_51_P445841 | DEP domain containing 6 Depdc6 NM_145470 | 111 | 0.7950 | 1.4690 | 0.8290 | 1.0310 | 0.3797 |
| A_51_P280890 | Phosphorylase kinase gamma 1 Phkg1 NM_011079 | 112 | 1.0790 | 1.1100 | 0.9040 | 1.0310 | 0.1111 |
| A_51_P411217 | Motile sperm domain containing 1 Mospd1 NM_027409 | 113 | 0.7870 | 0.8980 | 1.4010 | 1.0287 | 0.3272 |
| A_51_P283175 | ENSEMBL Accession No. ENSMUST00000021240 | 114 | 0.7120 | 0.9590 | 1.4130 | 1.0280 | 0.3556 |
| A_51_P518586 | Gene rich cluster, C2f gene Grcc2f NM_013536 | 115 | 0.9390 | 1.3510 | 0.7910 | 1.0270 | 0.2902 |
| A_52_P656699 | Actinin alpha 3 Actn3 NM_013456 | 116 | 0.6830 | 1.6910 | 0.7060 | 1.0267 | 0.5754 |
| A_51_P105927 | RAS-like, family 12 Rasl12 AK014511 | 117 | 0.9910 | 1.3210 | 0.7560 | 1.0227 | 0.2838 |
| A_51_P199187 | RIKEN cDNA 2900024C23 gene 2900024C23Rik NM_026062 | 118 | 0.9820 | 0.5260 | 1.5550 | 1.0210 | 0.5156 |
| A_51_P381763 | S-adenosylmethionine decarboxylase 1 Amd1 Z14986 | 119 | 0.6270 | 0.6130 | 1.8200 | 1.0200 | 0.6929 |
| A_51_P251717 | RIKEN cDNA 0610007e 0610007 NM_026304 | 120 | 0.7020 | 1.3140 | 1.0430 | 1.0197 | 0.3067 |
| A_52_P478339 | RIKEN cDNA 2510006C20 gene 2510006C20Rik NM_026527 | 121 | 0.6850 | 0.6940 | 1.6790 | 1.0193 | 0.5713 |
| A_51_P101879 | Peptidylprolyl isomerase D (cyclophilin D) Ppid NM_026352 | 122 | 0.7550 | 0.4180 | 1.8770 | 1.0167 | 0.7639 |
| A_51_P128575 | Secretoglobin, family 1A, member 1 (uteroglobin) Scgb1a1 | 123 | 1.2750 | 0.6140 | 1.1530 | 1.0140 | 0.3517 |
| | NM_011681 | | | | | | |
| A_52_P177021 | 6-pyruvoyl-tetrahydropterin synthase Pts NM_011220 | 124 | 0.9700 | 1.1490 | 0.9180 | 1.0123 | 0.1212 |
| A_51_P394515 | Transketolase Tkt NM_009388 | 125 | 2.3580 | 1.8760 | −1.2000 | 1.0113 | 1.9302 |
| A_51_P493886 | Glutamic pyruvate transaminase (alanine aminotransferase) 2 | 126 | 0.9710 | 1.3170 | 0.7440 | 1.0107 | 0.2886 |
| | Gpt2 NM_173866 | | | | | | |
| A_51_P203306 | Vomeronasal 1 receptor, I10 V1ri10 NM_134245 | 127 | 0.9590 | 1.0570 | 1.0160 | 1.0107 | 0.0492 |
| A_51_P389531 | Heterogeneous nuclear ribonucleoproteins methyltransferase- | 128 | 0.4980 | 1.6640 | 0.8640 | 1.0087 | 0.5963 |
| | like 2 (S. cerevisiae) Hrmt1l2 NM_019830 | | | | | | |
| A_52_P383572 | Myosin light chain, phosphorylatable, fast skeletal muscle Mylpf | 129 | 0.7980 | 1.0690 | 1.1490 | 1.0053 | 0.1840 |
| | NM_016754 | | | | | | |
| A_52_P576863 | Inosine triphosphatase (nucleoside triphosphate | 130 | 0.4850 | 1.5010 | 1.0260 | 1.0040 | 0.5084 |
| | pyrophosphatase) Itpa NM_025922 | | | | | | |
| A_51_P364146 | Lactate dehydrogenase 1, A chain Ldh1 NM_010699 | 89 | 0.7020 | 1.4990 | 0.8080 | 1.0030 | 0.4328 |

B. Genes More Highly Expressed by at Least Four Fold in Achilles Tendon than Gastrocnemius Muscle

| | | | | | | | |
|---|---|---|---|---|---|---|---|
| A_51_P196087 | Neuron navigator 1 Nav1 NM_173437 | 131 | −1.5730 | −2.3530 | −2.1010 | −2.0090 | 0.3981 |
| A_52_P173197 | Dual specificity phosphatase 7 Dusp7 NM_153459 | 132 | −4.2460 | −1.1240 | −0.6610 | −2.0103 | 1.9499 |
| A_51_P320852 | CD9 antigen Cd9 NM_007657 | 133 | −1.2400 | −2.1210 | −2.6720 | −2.0110 | 0.7223 |
| A_52_P401504 | Thrombospondin 4 Thbs4 NM_011582 | 134 | −1.9460 | −2.5530 | −1.5880 | −2.0290 | 0.4878 |
| A_51_P416647 | Kallikrein 13 Klk13 NM_010115 | 135 | −1.8420 | −1.8890 | −2.3820 | −2.0377 | 0.2991 |
| A_52_P361673 | Myosin IB Myo1b NM_010863 | 136 | −1.4800 | −2.7870 | −1.8510 | −2.0393 | 0.6735 |
| A_51_P324351 | Antigen p97 (melanoma associated) identified by monoclonal | 137 | −1.7170 | −2.3650 | −2.0390 | −2.0403 | 0.3240 |
| | antibodies 133.2 and 96.5 Mfi2 NM_013900 | | | | | | |
| A_52_P675052 | Golgi autoantigen, golgin subfamily b, macrogolgin 1 Golgb1 | 138 | −1.8130 | −2.4730 | −1.8530 | −2.0463 | 0.3700 |
| | XM_148244 | | | | | | |
| A_51_P207622 | Fibromodulin Fmod NM_021355 | 139 | −2.2310 | −1.4920 | −2.4400 | −2.0543 | 0.4981 |
| A_51_P507669 | 18S ribosomal RNA-like mRNA, partial sequence AY248756 | 140 | −1.9530 | −5.2140 | 0.9840 | −2.0610 | 3.1004 |
| A_52_P535255 | CCNDBP1 interactor Cbpin NM_026780 | 141 | −1.5590 | −2.4890 | −2.1490 | −2.0657 | 0.4706 |
| A_51_P453909 | Cytochrome P450, family 2, subfamily f, polypeptide 2 Cyp2f2 | 142 | −1.8200 | −2.1690 | −2.2140 | −2.0677 | 0.2157 |
| | NM_007817 | | | | | | |
| A_51_P133684 | Cysteine and glycine-rich protein 3 Csrp3 NM_013808 | 143 | −2.0670 | −1.9740 | −2.1820 | −2.0743 | 0.1042 |
| A_52_P626069 | Chromodomain helicase DNA binding protein 9 Chd9 | 144 | −1.7420 | −2.9350 | −1.5620 | −2.0797 | 0.7462 |
| | AK040994 | | | | | | |
| A_51_P423981 | Cathepsin S Ctss NM_021281 | 145 | −1.2570 | −1.7030 | −3.3360 | −2.0987 | 1.0945 |
| A_51_P405397 | Extracellular matrix protein 1 Ecm1 NM_007899 | 146 | −1.8490 | −1.3120 | −3.1380 | −2.0997 | 0.9385 |
| A_52_P81252 | Extracellular matrix protein 1 Ecm1 NM_172599 | 147 | −1.2990 | −3.7520 | −1.2690 | −2.1067 | 1.4250 |
| A_52_P244682 | RIKEN cDNA 5430435G22 gene 5430435G22Rik NM_145509 | 148 | −1.4250 | −2.5330 | −2.3930 | −2.1170 | 0.6034 |
| A_52_P593278 | Microtubule-associated protein 1 A Mtap1a AK018185 | 149 | −2.5310 | −1.8330 | −1.9960 | −2.1200 | 0.3651 |
| A_52_P649074 | Vacuolar protein sorting 13C (yeast) Vps13c XM_620758 | 150 | −1.6610 | −2.6560 | −2.0520 | −2.1230 | 0.5013 |
| A_51_P420276 | Plexin domain containing 2 Plxdc2 NM_026162 | 151 | −1.5640 | −2.2380 | −2.5850 | −2.1290 | 0.5192 |
| A_51_P145010 | RIKEN cDNA 2310067L16 gene AK010095 | 152 | −2.4410 | −2.1760 | −1.7820 | −2.1330 | 0.3316 |
| A_51_P204831 | Cysteine-rich protein 1 (intestinal) Crip1 NM_007763 | 153 | −1.4790 | −2.1040 | −2.8330 | −2.1387 | 0.6777 |
| A_52_P228437 | Muscleblind-like 1 (Drosophila) Mbnl1 AK088871 | 154 | −2.1620 | −3.0700 | −1.2000 | −2.1440 | 0.9351 |
| A_52_P360921 | RNA binding motif protein 5 Rbm5 NM_148930 | 155 | −1.7300 | −3.2260 | −1.4800 | −2.1453 | 0.9442 |
| A_51_P275949 | Lysyl oxidase-like 2 Loxl2 NM_033325 | 156 | −1.4840 | −2.5160 | −2.4380 | −2.1460 | 0.5746 |
| A_52_P187855 | Tripartite motif protein 37 Trim37 NM_197987 | 157 | −1.2020 | −2.4610 | −2.8260 | −2.1630 | 0.8520 |
| A_51_P244492 | Neuroblastoma, suppression of tumorigenicity 1 Nbl1 | 158 | −1.9040 | −1.9110 | −2.6790 | −2.1647 | 0.4454 |
| | NM_008675 | | | | | | |
| A_51_P462428 | UDP-N-acetyl-alpha-D-galactosamine:polypeptide N- | 159 | −1.4910 | −1.5130 | −3.5440 | −2.1827 | 1.1790 |
| | acetylgalactosaminyltransferase-like 2 Galntl2 NM_030166 | | | | | | |
| A_51_P383270 | Fraser syndrome 1 homolog (human) Fras1 NM_175473 | 160 | −1.7110 | −2.9910 | −1.8980 | −2.2000 | 0.6914 |
| A_52_P413395 | Sarcolipin Sln NM_025540 | 161 | −2.1640 | −3.0610 | −1.4090 | −2.2113 | 0.8270 |
| A_51_P504037 | SWI/SNF related, matrix associated, actin dependent regulator | 162 | −1.5960 | −3.2260 | −1.8410 | −2.2210 | 0.8789 |
| | of chromatin, subfamily a, member 2 Smarca2 NM_011416 | | | | | | |
| A_52_P10793 | Pleiotrophin Ptn NM_008973 | 163 | −1.6540 | −2.2110 | −2.8250 | −2.2300 | 0.5857 |
| A_52_P599728 | Microtubule-associated protein 1 A Mtap1a XM_194040 | 164 | −1.8590 | −3.4620 | −1.3900 | −2.2370 | 1.0865 |
| A_51_P154417 | Fibulin 1 Fbln1 NM_010180 | 165 | −1.4670 | −2.3700 | −2.8780 | −2.2383 | 0.7147 |
| A_51_P199266 | mRNA for RCK, complete cds D50494 | 166 | −1.5300 | −4.8510 | −0.3580 | −2.2463 | 2.3306 |
| A_51_P194230 | Zinc finger protein of the cerebellum 1 Zic1 NM_009573 | 167 | −1.6410 | −2.6110 | −2.5310 | −2.2610 | 0.5384 |
| A_51_P517075 | Serine (or cysteine) proteinase inhibitor, clade F, member 1 | 168 | −1.9700 | −2.2740 | −2.5970 | −2.2803 | 0.3135 |
| | Serpinf1 NM_011340 | | | | | | |
| A_51_P365344 | AHNAK nucleoprotein (desmoyokin) Ahnak NM_009643 | 169 | −1.5880 | −3.0580 | −2.2240 | −2.2900 | 0.7372 |
| A_51_P381260 | FXYD domain-containing ion transport regulator 5 Fxyd5 | 170 | −1.6930 | −2.2800 | −2.9240 | −2.2990 | 0.6157 |
| | NM_008761 | | | | | | |
| A_52_P527944 | Protein tyrosine phosphatase, receptor type Z, polypeptide 1 | 172 | −3.2350 | −5.4710 | 1.7870 | −2.3063 | 3.7170 |
| | Ptprz1 AJ428208 | | | | | | |
| A_51_P367720 | Clusterin Clu NM_013492 | 173 | −2.1010 | −2.2840 | −2.5600 | −2.3150 | 0.2311 |
| A_51_P115178 | Scavenger receptor class A, member 3 Scara3 NM_172604 | 174 | −1.9430 | −1.9610 | −3.0430 | −2.3157 | 0.6300 |
| A_51_P443902 | Kallikrein 16 Klk16 NM_008454 | 175 | −1.9360 | −2.0990 | −2.9230 | −2.3193 | 0.5291 |
| A_51_P160673 | Potassium voltage-gated channel, Isk-related family, member | 176 | −1.5110 | −1.5550 | −3.9080 | −2.3247 | 1.3714 |
| | 1-like Kcne1l NM_021487 | | | | | | |
| A_52_P508750 | Granulin Grn NM_008175 | 177 | −2.9310 | −6.2110 | 2.1580 | −2.3280 | 4.2170 |
| A_51_P353221 | Thrombospondin 4 Thbs4 NM_011582 | 134 | −1.9460 | −1.8180 | −3.2250 | −2.3297 | 0.7780 |
| A_52_P434306 | RIKEN cDNA 2310067L16 gene 2310067L16Rik XM_193814 | 178 | −2.7830 | −2.1860 | −2.0220 | −2.3303 | 0.4005 |
| A_51_P298107 | Vitrin Vit NM_028813 | 179 | −1.8720 | −1.7480 | −3.3750 | −2.3317 | 0.9057 |
| A_51_P291062 | Procollagen, type XVI, alpha 1 Col16a1 NM_028266 | 180 | −2.3150 | −1.9440 | −2.7400 | −2.3330 | 0.3983 |
| A_51_P183746 | Paired related homeobox 2 Prrx2 NM_009116 | 181 | −2.3730 | −2.8000 | −1.8920 | −2.3550 | 0.4543 |
| A_51_P395309 | Kallikrein 5 Klk5 NM_008456 | 182 | −2.1900 | −2.5250 | −2.3870 | −2.3673 | 0.1684 |
| A_52_P416123 | RIKEN cDNA 9430072K23 gene 9430072K23Rik AK020483 | 183 | −1.9190 | −4.4280 | −0.8340 | −2.3937 | 1.8434 |
| A_52_P540219 | Tissue inhibitor of metalloproteinase 2 Timp2 NM_011594 | 184 | −2.0620 | −2.5520 | −2.5790 | −2.3977 | 0.2910 |
| A_52_P440284 | RIKEN cDNA 1810057P16 gene 1810057P16Rik AK021409 | 185 | −2.0580 | −2.8640 | −2.2920 | −2.4047 | 0.4146 |
| A_52_P335089 | RIKEN cDNA 2610005L07 gene 2610005L07Rik AK009182 | 186 | −1.7860 | −3.4520 | −2.0180 | −2.4187 | 0.9024 |
| A_52_P120037 | Epithelial membrane protein 1 Emp1 NM_010128 | 187 | −1.6940 | −2.2150 | −3.3610 | −2.4233 | 0.8528 |
| A_52_P533161 | Actin-binding LIM protein 1 Ablim1 NM_178688 | 188 | −1.9010 | −3.6130 | −1.8580 | −2.4573 | 1.0011 |
| A_52_P472583 | Ribosome binding protein 1 Rrbp1 XM_622097 | 189 | −2.2550 | −2.8500 | −2.3040 | −2.4697 | 0.3303 |
| A_51_P349546 | CD109 antigen Cd109 NM_153098 | 190 | −1.7560 | −2.6680 | −2.9940 | −2.4727 | 0.6417 |
| A_51_P193475 | RIKEN cDNA D130005J21 gene C130096N06Rik NM_176841 | 191 | −2.1410 | −2.6120 | −2.6710 | −2.4747 | 0.2905 |
| A_52_P270429 | RIKEN cDNA 2200001I15 gene 2200001I15Rik NM_183278 | 192 | −1.1460 | −0.9690 | −5.3790 | −2.4980 | 2.4966 |
| A_51_P449624 | RIKEN cDNA 6430706D22 gene 6430706D22Rik BC004768 | 193 | −1.9020 | −3.7950 | −1.7990 | −2.4987 | 1.1238 |
| A_52_P434549 | Apoptotic chromatin condensation inducer 1 Acin1 NM_023190 | 194 | −1.8590 | −3.0440 | −2.5990 | −2.5007 | 0.5986 |
| A_52_P115191 | Similar to hypothetical protein 1 (rRNA external transcribed | 195 | −2.2840 | −5.4200 | 0.1530 | −2.5170 | 2.7938 |
| | spacer) - mouse LOC434481 XM_486315 | | | | | | |
| A_51_P261999 | RIKEN cDNA 2410075B13 gene 2410075B13Rik NM_146059 | 196 | −1.6930 | −3.3390 | −2.5840 | −2.5387 | 0.8239 |
| A_51_P281089 | S100 calcium binding protein A6 (calcyclin) S100a6 | 197 | −2.1130 | −2.2760 | −3.2480 | −2.5457 | 0.6137 |
| | NM_011313 | | | | | | |
| A_51_P372819 | Prostaglandin I2 (prostacyclin) synthase Ptgis NM_008968 | 198 | −2.2840 | −2.2540 | −3.1010 | −2.5463 | 0.4806 |
| A_51_P123655 | Keratocan Kera NM_008438 | 199 | −2.0950 | −3.5360 | −2.0520 | −2.5610 | 0.8446 |
| A_51_P107140 | Keratin complex 1, acidic, gene 24 Krt1-24 NM_016880 | 200 | −2.7570 | −3.2770 | −1.6570 | −2.5637 | 0.8271 |
| A_51_P249957 | Fibroblast growth factor 18 Fgf18 NM_008005 | 201 | −2.1810 | −2.8080 | −2.7390 | −2.5760 | 0.3438 |
| A_52_P581138 | DNA segment, Chr 2, ERATO Doi 485, expressed D2Ertd485e | 202 | −2.1320 | −4.0810 | −1.5190 | −2.5773 | 1.3378 |
| | NM_212450 | | | | | | |
| A_51_P157042 | Connective tissue growth factor Ctgf NM_010217 | 203 | −2.3910 | −2.5480 | −2.8380 | −2.5923 | 0.2268 |
| A_51_P334104 | Decorin Dcn NM_007833 | 204 | −2.0630 | −2.7930 | −2.9460 | −2.6007 | 0.4719 |
| A_51_P377045 | RIKEN cDNA 9430072K23 gene 9430072K23Rik AK090111 | 205 | −2.2590 | −4.3140 | −1.3510 | −2.6413 | 1.5181 |
| A_51_P416126 | Chromodomain helicase DNA binding protein 3 Chd3 | 206 | −2.5020 | −3.3810 | −2.0530 | −2.6453 | 0.6755 |
| | XM_484041 | | | | | | |
| A_52_P249402 | Prothymosin alpha Ptma NM_008972 | 207 | −1.5370 | −3.7690 | −2.6760 | −2.6607 | 1.1161 |
| A_51_P395652 | Myosin, heavy polypeptide 2, skeletal muscle, adult Myh2 | 208 | −2.9150 | −3.1360 | −1.9760 | −2.6757 | 0.6159 |
| | NM_144961 | | | | | | |
| A_51_P475049 | Ubiquitin carboxy-terminal hydrolase L1 Uchl1 NM_011670 | 209 | −2.3610 | −2.3850 | −3.3330 | −2.6930 | 0.5544 |
| A_51_P394383 | Metastasis associated lung adenocarcinoma transcript 1 (non- | 210 | −2.4460 | −3.3850 | −2.3080 | −2.7130 | 0.5860 |
| | coding RNA) Malat1 BC004722 | | | | | | |
| A_51_P321579 | Chromodomain helicase DNA binding protein 5 Chd5 | 211; | −2.3080 | −4.0960 | −1.8570 | −2.7537 | 1.1842 |
| | XM_196334; NM_029216 | 171 | | | | | |
| A_51_P314501 | Leucyl-tRNA synthetase, mitochondrial Lars2 NM_153168 | 212 | −2.2900 | −5.8750 | −0.2200 | −2.7950 | 2.8611 |
| A_51_P204153 | Insulin-like growth factor binding protein 5 Igfbp5 NM_010518 | 213 | −2.0130 | −3.5930 | −2.7890 | −2.7983 | 0.7900 |
| A_51_P412926 | Keratin complex 1, acidic, gene C29 Krt1-c29 NM_010666 | 214 | −2.2990 | −2.4740 | −3.6950 | −2.8227 | 0.7605 |
| A_52_P467690 | Spectrin beta 2 Spnb2 NM_175836 | 215 | −2.2270 | −3.5740 | −2.7160 | −2.8390 | 0.6819 |
| A_51_P110830 | A disintegrin-like and metalloprotease (reprolysin type) with | 216 | −2.4040 | −3.3270 | −2.9030 | −2.8780 | 0.4620 |
| | thrombospondin type 1 motif, 8 Adamts8 NM_013906 | | | | | | |
| A_52_P302544 | Procollagen, type VIII, alpha 2 Col8a2 NM_199473 | 217 | −2.6290 | −3.1970 | −2.8540 | −2.8933 | 0.2860 |
| A_52_P631547 | Cytokine like 1 Cyt1 BC063103 | 218 | −2.5890 | −3.1850 | −2.9130 | −2.8957 | 0.2984 |
| A_52_P496566 | AHNAK nucleoprotein (desmoyokin) Ahnak NM_175108 | 219 | −2.4980 | −3.9270 | −2.3250 | −2.9167 | 0.8792 |
| A_51_P194070 | Peptidylglycine alpha-amidating monooxygenase Pam | 220 | −2.3910 | −3.6980 | −2.6640 | −2.9177 | 0.6894 |
| | NM_013626 | | | | | | |
| A_51_P100856 | Fibronectin 1 Fn1 NM_010233 | 221 | −2.5980 | −3.2920 | −2.9870 | −2.9590 | 0.3478 |
| A_52_P846109 | Microtubule-associated protein 1 A Mtap1a XM_194040 | 164 | −1.8550 | −3.2240 | −3.9180 | −2.9990 | 1.0497 |
| A_52_P658611 | Procollagen, type I, alpha 1 Col1a1 NM_007742 | 222 | −2.0650 | −4.8650 | −2.0700 | −3.0000 | 1.6151 |
| A_51_P441898 | RIKEN cDNA 4631426H08 gene 4631426H08Rik NM_133730 | 223 | −2.7560 | −2.7210 | −3.5490 | −3.0087 | 0.4683 |
| A_51_P358765 | Secreted phosphoprotein 1 Spp1 NM_009263 | 224 | −2.4410 | −2.9060 | −4.0040 | −3.1170 | 0.8026 |
| A_52_P509020 | A disintegrin-like and metalloprotease (reprolysin type) with | 216 | −2.8000 | −3.8820 | −2.7370 | −3.1397 | 0.6437 |
| | thrombospondin type 1 motif, 8 Adamts8 NM_013906 | | | | | | |
| A_52_P525107 | Procollagen, type I, alpha 1 Col1a1 NM_007742 | 222 | −2.9910 | −3.7460 | −2.7660 | −3.1677 | 0.5133 |
| A_51_P303217 | RIKEN cDNA 1110017I16 gene 1110017I16Rik NM_026754 | 225 | −2.7180 | −3.7460 | −3.1760 | −3.2133 | 0.5150 |
| A_51_P495269 | Loricrin Lor NM_008508 | 226 | −1.1290 | −2.1470 | −6.7300 | −3.3353 | 2.9836 |
| A_51_P480073 | Chondroadherin Chad NM_007689 | 227 | −3.1360 | −3.6710 | −3.7660 | −3.5243 | 0.3396 |
| A_51_P182303 | Procollagen, type I, alpha 2 Col1a2 NM_007743 | 228 | −3.3030 | −3.6030 | −3.6930 | −3.5330 | 0.2042 |
| A_51_P207591 | Annexin A8 Anxa8 NM_013473 | 229 | −3.0530 | −3.9810 | −3.6230 | −3.5523 | 0.4680 |
| A_51_P207591 | Annexin A8 Anxa8 NM_013473 | 229 | −3.5780 | −3.2580 | −4.0470 | −3.6277 | 0.3968 |
| A_51_P486121 | AF4/FMR2 family, member 3 Aff3 AK209098 | 230 | −3.1750 | −4.8910 | −2.8890 | −3.6517 | 1.0828 |
| A_51_P207591 | Annexin A8 Anxa8 NM_013473 | 229 | −3.3790 | −3.9780 | −3.7300 | −3.6957 | 0.3010 |
| A_51_P207591 | Annexin A8 Anxa8 NM_013473 | 229 | −3.4140 | −3.9550 | −3.7250 | −3.6980 | 0.2715 |
| A_51_P220150 | FK506 binding protein 12-rapamycin associated protein 1 | 231 | −3.0980 | −3.6400 | −4.4850 | −3.7410 | 0.6990 |
| | Frap1 BC023373 | | | | | | |
| A_51_P207591 | Annexin A8 Anxa8 NM_013473 | 229 | −3.1360 | −4.3440 | −3.9180 | −3.7993 | 0.6127 |
| A_51_P105078 | S100 calcium binding protein A4 S100a4 NM_011311 | 232 | −3.0610 | −3.2290 | −5.3650 | −3.8850 | 1.2845 |
| A_51_P207591 | Annexin A8 Anxa8 NM_013473 | 229 | −3.1940 | −4.8350 | −3.6870 | −3.9053 | 0.8420 |
| A_52_P667913 | Protocadherin gamma subfamily A, 7 Pcdhga7 NM_033590 | 233 | −2.5810 | −5.4080 | −3.7700 | −3.9197 | 1.4194 |
| A_51_P512969 | Cartilage intermediate layer protein 2 Cilp2 AK004006 | 234 | −3.7500 | −4.0320 | −4.2110 | −3.9977 | 0.2324 |
| A_51_P364639 | Keratin complex 2, basic, gene 6g Krt2-6g NM_019956 | 235 | −4.5190 | −3.3910 | −4.1590 | −4.0230 | 0.5762 |
| A_51_P207591 | Annexin A8 Anxa8 NM_013473 | 229 | −3.3870 | −4.1790 | −4.5500 | −4.0387 | 0.5941 |
| A_51_P207591 | Annexin A8 Anxa8 NM_013473 | 229 | −3.4160 | −3.8430 | −4.8930 | −4.0507 | 0.7601 |
| A_51_P484526 | Wnt inhibitory factor 1 Wif1 NM_011915 | 236 | −3.4400 | −4.6040 | −4.1520 | −4.0653 | 0.5868 |
| A_51_P207591 | Annexin A8 Anxa8 NM_013473 | 229 | −3.4590 | −4.0170 | −4.7310 | −4.0690 | 0.6376 |
| A_51_P207591 | Annexin A8 Anxa8 NM_013473 | 229 | −3.4930 | −4.0270 | −4.7910 | −4.1037 | 0.6524 |
| A_52_P571290 | RIKEN cDNA 2610009E16 gene 2610009E16Rik NM_026988 | 237 | −3.0450 | −4.9320 | −4.4950 | −4.1573 | 0.9878 |
| A_51_P409010 | Cartilage oligomeric matrix protein Comp NM_016685 | 238 | −3.8980 | −4.9110 | −4.7730 | −4.5273 | 0.5494 |
| A_51_P377094 | Procollagen, type I, alpha 1 Col1a1 NM_007742 | 222 | −4.2140 | −6.4150 | −3.7230 | −4.7840 | 1.4337 |
| A_51_P404463 | RIKEN cDNA 1500015O10 gene 1500015O10Rik NM_024283 | 239 | −4.3710 | −5.6800 | −5.3680 | −5.1397 | 0.6837 |
| A_51_P280455 | Proteoglycan 4 (megakaryocyte stimulating factor, articular | 240 | −5.0520 | −6.0760 | −5.2560 | −5.4613 | 0.5420 |
| | superficial zone protein) Prg4 XM_355243 | | | | | | |

^{a}The data in the columns entitled “Experiment A”, “Experiment B”, “Experiment C”, “Mean”, and “STDEV” are presented in the form of a fold increase in gastrocnemius muscle versus Achilles tendon. The values are expressed as the log₂[fold increase]. By way of example, the first entry in Table 1A corresponds to “Cell death-inducing DNA fragmentation factor, alpha subunit-like effector A Cidea NM_007702”, and has a mean of 2.3853. Thus, this gene has expressed 2^{2.3853} (i.e., about 5.22) fold higher in gastrocnemius muscle than in Achilles tendon. In Table 1B, the means have negative values to indicate that these genes are overexpressed in Achilles tendon versus gastrocnemius nuscle (i.e., underexpressed in gastrocnemius muscle versus Achilles tendon). Therefore, Proteoglycan 4 (megakaryocyte stimulating factor, articular superficial zone protein) Prg4 XM_355243 is expressed at a level that is 2^{5.4613} (about 44.1) fold higher in Achilles tendon than in gastrocnemius muscle.
^{b}The descriptions that appear in the column headed by “NAME” include one or more of a gene description, a gene name, and one or more database accession numbers. All accession numbers are for the GENBANK ® database unless otherwise indicated. Thus, the entry “Cell death-inducing DNA fragmentation factor, alpha subunit-like effector A Cidea NM_007702”, the gene name is “Cidea”, which is “cell death-inducing DNA fragmentation factor, alpha subunit-like effector A”, and corresponds to GENBANK Accession No. NM_007702.

### Example 2

### Gene Expression Analysis of Wild Type Mouse Tendon Versus P2Y₂ Knock Out Mouse Tendon

[0208] Mice homozygous for a targeted disruption of the purinergic P2Y₂ receptor (P2Y₂-R) have been described (see Cressman et al., 1999). Achilles tendons were isolated from mice homozygous for the P2Y₂-R knockout and wild type mice as outlined in EXAMPLE 1. RNA was then prepared for a reverse transcriptase reaction using random hexamers to prepare cDNAs. Wild type mouse Achilles tendon (AT) RNAs were reverse transcribed into cDNAs labeled with Cyanine 3 (a green dye fluorophore; Cy3) as the control dye while P2Y₂-R knockout (P2Y₂ KO) tendon RNAs were labeled with cyanine 5 (a red dye fluorophore; Cy5). cDNAs from AT or P2Y₂ KO were pooled in equal proportions then hybridized with arrayed DNA sequences using the Agilent mouse microarray chip. Hybridized arrays were then imaged and fluorescence quantitation was made for each dye and each spot. The ratio of fluorescence intensities for red and green for each spot was proportional to the relative abundance of each cDNA in the target specimens. Genes that showed at least a 4 fold difference between WT and P2Y₂ KO tendon are presented in Table 2.

TABLE 2
Comparison of Gene Expression Levels Between Wild Type Mouse Achilles Tendon and P2Y2 Knockout Mouse Achilles Tendon^{a}

| | | | | | | |
|---|---|---|---|---|---|---|
| | | SEQ ID | | | | |
| CLID | NAME^{b} | NO: | Experiment A | Experiment B | Mean | STDEV |

A. Genes Upregulated at Least Three Fold in P2Y2 Knockout Mice

| | | | | | | |
|---|---|---|---|---|---|---|
| A_51_P163106 | 3-hydroxybutyrate dehydrogenase (heart, mitochondrial) Bdh | 241 | 2.8290 | 2.5870 | 2.7080 | 0.1711 |
| | NM_175177 | | | | | |
| A_51_P150145 | Adult male testis cDNA, RIKEN full-length enriched library, | 242 | 2.1000 | 2.4800 | 2.2900 | 0.2687 |
| | clone: 4932438E20 product: unknown EST, full insert sequence | | | | | |
| | AK077046 | | | | | |
| A_52_P16563 | cDNA sequence BC040823 BC040823 BC040823 | 243 | 2.3060 | 2.2440 | 2.2750 | 0.0438 |
| A_51_P480427 | Olfactory receptor 430 Olfr430 NM_146718 | 244 | 2.0470 | 2.2620 | 2.1545 | 0.1520 |
| A_52_P301724 | Ngfi-A binding protein 1 Nab1 AK018122 | 245 | 1.2280 | 2.8560 | 2.0420 | 1.1512 |
| A_51_P338443 | Angiopoietin-like 4 Angptl4 NM_020581 | 246 | 2.5020 | 1.4150 | 1.9585 | 0.7686 |
| A_51_P250217 | Phosphoenolpyruvate carboxykinase 1, cytosolic Pck1 | 19 | 1.7550 | 2.0940 | 1.9245 | 0.2397 |
| | NM_011044 | | | | | |
| A_51_P361557 | LUC7-like 2 (S. cerevisiae) Luc7l2 NM_138680 | 247 | 0.8300 | 2.8800 | 1.8550 | 1.4496 |
| A_52_P566316 | RIKEN cDNA 2310015A10 gene 2310015A10Rik AK053779 | 248 | 2.4720 | 1.2060 | 1.8390 | 0.8952 |
| A_52_P619911 | Dapper homolog 2, antagonist of beta-catenin (Xenopus) Dact2 | 249 | 2.0550 | 1.5410 | 1.7980 | 0.3635 |
| | AK041604 | | | | | |
| A_51_P324690 | Osteoclast inhibitory lectin Ocil NM_053109 | 250 | 0.5180 | 3.0320 | 1.7750 | 1.7777 |
| A_51_P400016 | RIKEN cDNA 2210407G14 gene 2210407G14Rik AK088732 | 251 | 2.6240 | 0.8960 | 1.7600 | 1.2219 |
| A_52_P274496 | Hypothetical protein 6720430O15 6720430O15 NM_183180 | 252 | 0.9730 | 2.5430 | 1.7580 | 1.1102 |
| A_51_P117666 | RIKEN cDNA 1810032O08 gene 1810032O08Rik NM_025472 | 253 | 1.8120 | 1.7010 | 1.7565 | 0.0785 |
| A_52_P779909 | Transcribed locus, strongly similar to NP_031532.2 ATP | 254 | 1.3430 | 2.1670 | 1.7550 | 0.5827 |
| | synthase, H+ transporting, mitochondrial F0 complex, subunit c | | | | | |
| | (subunit 9), isoform 1 [Mus musculus] AI481739 | | | | | |
| A_51_P364168 | Low density lipoprotein receptor-related protein 5 Lrp5 | 255 | 1.8350 | 1.6240 | 1.7295 | 0.1492 |
| | NM_008513 | | | | | |
| A_51_P166277 | Serine/arginine repetitive matrix 2 Srrm2 NM_175229 | 256 | 2.1400 | 1.2670 | 1.7035 | 0.6173 |
| A_52_P361391 | Olfactory receptor 1153 Olfr1153 NM_146640 | 257 | 1.4480 | 1.9370 | 1.6925 | 0.3458 |
| A_52_P448304 | RIKEN cDNA 2900045N06 gene 2900045N06Rik NM_028385 | 258 | 1.5500 | 1.7670 | 1.6585 | 0.1534 |
| A_51_P112627 | Sialyltransferase 7 ((alpha-N-acetylneuraminyl 2,3-beta- | 259 | 0.9360 | 2.3400 | 1.6380 | 0.9928 |
| | galactosyl-1,3)-N-acetyl galactosaminde alpha-2,6- | | | | | |
| | sialyltransferase) B Siat7b NM_009180 | | | | | |
| A_51_P483473 | Sialyltransferase 9 (CMP-NeuAc:lactosylceramide alpha-2,3- | 260 | 1.3280 | 1.9440 | 1.6360 | 0.4356 |
| | sialyltransferase) Siat9 NM_011375 | | | | | |
| A_52_P260346 | Hemoglobin, beta adult major chain Hbb-b1 NM_008220 | 4 | 2.5450 | 0.6760 | 1.6105 | 1.3216 |
| A_51_P358233 | RIKEN cDNA 2310061N23 gene 2310061N23Rik AK010014 | 261 | 1.1330 | 2.0810 | 1.6070 | 0.6703 |

B. Genes Downregulated at Least Three Fold in P2Y2 Knockout Mice

| | | | | | | |
|---|---|---|---|---|---|---|
| A_52_P174328 | RIKEN cDNA 9430063L05 gene 9430063L05Rik NM_178080 | 263 | −0.4960 | −2.7030 | −1.5995 | 1.5606 |
| A_51_P396879 | RIKEN cDNA E130201H02 gene E130201H02Rik AK021400 | 264 | −0.4340 | −2.7650 | −1.5995 | 1.6483 |
| A_51_P193336 | Nucleobindin 2 Nucb2 NM_016773 | 265 | −0.3140 | −2.8880 | −1.6010 | 1.8201 |
| A_52_P413289 | ADP-ribosylation factor-like 1 Arl1 NM_025859 | 266 | −1.1800 | −2.0230 | −1.6015 | 0.5961 |
| A_52_P652212 | Proteasome (prosome, macropain) 26S subunit, non-ATPase, | 267 | −1.0100 | −2.1930 | −1.6015 | 0.8365 |
| | 14 Psmd14 NM_021526 | | | | | |
| A_52_P581138 | DNA segment, Chr 2, ERATO Doi 485, expressed D2Ertd485e | 202 | −2.7130 | −0.4910 | −1.6020 | 1.5712 |
| | NM_212450 | | | | | |
| A_51_P239693 | Myeloid/lymphoid or mixed-lineage leukemia 5 Mll5 BC036286 | 268 | −1.2800 | −1.9250 | −1.6025 | 0.4561 |
| A_52_P214851 | Survival motor neuron domain containing 1 Smndc1 | 269 | −1.1150 | −2.0900 | −1.6025 | 0.6894 |
| | NM_172429 | | | | | |
| A_51_P296456 | RIKEN cDNA 3010027A04 gene 3010027A04Rik AK019393 | 270 | −2.2200 | −0.9890 | −1.6045 | 0.8704 |
| A_52_P228079 | Activating transcription factor 1 Atf1 NM_007497 | 271 | −1.3250 | −1.8930 | −1.6090 | 0.4016 |
| A_51_P129299 | Synaptophysin-like protein Sypl NM_013635 | 272 | −1.3800 | −1.8380 | −1.6090 | 0.3239 |
| A_52_P647740 | Kelch repeat and BTB (POZ) domain containing 10 Kbtbd10 | 273 | −0.8460 | −2.3750 | −1.6105 | 1.0812 |
| | XM_130293 | | | | | |
| A_52_P597860 | WAS protein family, member 2 Wasf2 NM_153423 | 274 | −2.2390 | −0.9890 | −1.6140 | 0.8839 |
| A_51_P409985 | RIKEN cDNA C530009C10 gene C530009C10Rik AK016794 | 275 | −1.2440 | −1.9860 | −1.6150 | 0.5247 |
| A_52_P276840 | ATPase, class II, type 9A Atp9a NM_015731 | 276 | −1.3950 | −1.8400 | −1.6175 | 0.3147 |
| A_51_P353221 | Thrombospondin 4 Thbs4 NM_011582 | 277 | −1.2460 | −1.9960 | −1.6210 | 0.5303 |
| A_52_P553841 | ATP synthase, H+ transporting mitochondrial F1 complex, beta | 278 | −0.4790 | −2.7650 | −1.6220 | 1.6164 |
| | subunit Atp5b NM_016774 | | | | | |
| A_52_P572284 | Lysosomal-associated protein transmembrane 4A Laptm4a | 279 | −1.3440 | −1.9020 | −1.6230 | 0.3946 |
| | NM_008640 | | | | | |
| A_52_P336142 | ATP-binding cassette, sub-family G (WHITE), member 2 Abcg2 | 280 | −1.5820 | −1.6730 | −1.6275 | 0.0643 |
| | NM_011920 | | | | | |
| A_51_P175146 | Copine III Cpne3 NM_027769 | 281 | −2.3250 | −0.9310 | −1.6280 | 0.9857 |
| A_51_P191400 | Titin Ttn AK035141 | 282 | −1.3860 | −1.8770 | −1.6315 | 0.3472 |
| A_52_P456279 | Chaperonin subunit 8 (theta) Cct8 NM_009840 | 283 | −1.3610 | −1.9120 | −1.6365 | 0.3896 |
| A_52_P359061 | Profilin 2 Pfn2 NM_019410 | 284 | −0.2910 | −2.9840 | −1.6375 | 1.9042 |
| A_52_P149438 | RIKEN cDNA 1110001A05 gene 1110001A05Rik NM_019809 | 285 | −1.3640 | −1.9140 | −1.6390 | 0.3889 |
| A_52_P534411 | Origin recognition complex, subunit 3-like (S. cerevisiae) Orc3l | 286 | −1.9340 | −1.3500 | −1.6420 | 0.4130 |
| | NM_015824 | | | | | |
| A_51_P470589 | Leucyl-tRNA synthetase Lars AK009823 | 287 | −2.4680 | −0.8180 | −1.6430 | 1.1667 |
| A_52_P462350 | Down-regulator of transcription 1 Dr1 NM_026106 | 288 | −2.4100 | −0.8780 | −1.6440 | 1.0833 |
| A_51_P485862 | Eukaryotic translation elongation factor 1 alpha 2 Eef1a2 | 289 | −0.7390 | −2.5590 | −1.6490 | 1.2869 |
| | NM_007906 | | | | | |
| A_51_P336491 | Casein kinase 1, alpha 1 Csnk1a1 NM_146087 | 290 | −2.1980 | −1.1030 | −1.6505 | 0.7743 |
| A_51_P106227 | Proteasome (prosome, macropain) subunit, alpha type 4 Psma4 | 291 | −1.4690 | −1.8390 | −1.6540 | 0.2616 |
| | NM_011966 | | | | | |
| A_51_P156833 | Ubiquitin specific protease 14 Usp14 NM_021522 | 292 | −2.2100 | −1.1120 | −1.6610 | 0.7764 |
| A_52_P668543 | Leukocyte-associated Ig-like receptor 1 Lair1 NM_178611 | 293 | −3.2020 | −0.1210 | −1.6615 | 2.1786 |
| A_52_P543430 | Similar to Ras-related protein Rab-2A LOC545747 XM_620188 | 294 | −1.5010 | −1.8290 | −1.6650 | 0.2319 |
| A_51_P231979 | Annexin A6 Anxa6 NM_013472 | 295 | −1.3870 | −1.9450 | −1.6660 | 0.3946 |
| A_52_P192106 | Similar to eukaryotic translation elongation factor 1 alpha 1 | 296 | −0.3710 | −2.9790 | −1.6750 | 1.8441 |
| | LOC545224 XM_619489 | | | | | |
| A_51_P421804 | Translocase of inner mitochondrial membrane 10 homolog | 297 | −2.6550 | −0.6970 | −1.6760 | 1.3845 |
| | (yeast) Timm10 NM_013896 | | | | | |
| A_52_P165455 | WW domain containing E3 ubiquitin protein ligase 1 Wwp1 | 298 | −2.3710 | −0.9820 | −1.6765 | 0.9822 |
| | BC055937 | | | | | |
| A_51_P163797 | RIKEN cDNA G630013P12 gene G630013P12Rik XM_127501 | 299 | −2.2860 | −1.0680 | −1.6770 | 0.8613 |
| A_52_P81562 | Eukaryotic translation elongation factor 2 Eef2 NM_007907 | 300 | −0.0150 | −3.3520 | −1.6835 | 2.3596 |
| A_51_P364788 | Myosin, heavy polypeptide 1, skeletal muscle, adult Myh1 | 301 | −1.1480 | −2.2280 | −1.6880 | 0.7637 |
| | AK041122 | | | | | |
| A_52_P355139 | RIKEN cDNA 1810015C04 gene 1810015C04Rik AK088619 | 302 | −1.1380 | −2.2530 | −1.6955 | 0.7884 |
| A_52_P189030 | MAX gene associated Mga NM_013720 | 303 | −1.0390 | −2.3690 | −1.7040 | 0.9405 |
| A_51_P134007 | Nucleolin Ncl NM_010880 | 304 | −1.0860 | −2.3230 | −1.7045 | 0.8747 |
| A_52_P553820 | NAP030172-1 | 305 | −2.0880 | −1.3250 | −1.7065 | 0.5395 |
| A_52_P454295 | Titin Ttn AK084780 | 306 | −2.7580 | −0.6560 | −1.7070 | 1.4863 |
| A_51_P207622 | Fibromodulin Fmod NM_021355 | 139 | −0.7320 | −2.6910 | −1.7115 | 1.3852 |
| A_52_P112188 | RIKEN cDNA A930027G11 gene Gnas NM_010309 | 307 | −0.3200 | −3.1120 | −1.7160 | 1.9742 |
| A_52_P412529 | F-box only protein 3 Fbxo3 NM_020593 | 308 | −2.4850 | −0.9530 | −1.7190 | 1.0833 |
| A_52_P657759 | Expressed sequence AI553587 AI553587 NM_178909 | 309 | −1.8270 | −1.6230 | −1.7250 | 0.1442 |
| A_52_P576886 | SMAD specific E3 ubiquitin protein ligase 2 Smurf2 | 310; 262 | −1.7610 | −1.6940 | −1.7275 | 0.0474 |
| | XM_126673; NM_025481 | | | | | |
| A_51_P229280 | Eukaryotic translation initiation factor 3, subunit 10 (theta) | 311 | −1.7190 | −1.7600 | −1.7395 | 0.0290 |
| | Eif3s10 X17373 | | | | | |
| A_52_P79187 | RIKEN cDNA 2900001A12 gene 2900001A12Rik AK013457 | 312 | −2.8400 | −0.6410 | −1.7405 | 1.5549 |
| A_51_P267544 | FSHD region gene 1 Frg1 NM_013522 | 313 | −2.2970 | −1.1850 | −1.7410 | 0.7863 |
| A_52_P134381 | Proteasome (prosome, macropain) 26S subunit, non-ATPase, | 314 | −1.4310 | −2.0660 | −1.7485 | 0.4490 |
| | 12 Psmd12 NM_025894 | | | | | |
| A_52_P496566 | RIKEN cDNA 2310047C17 gene 2310047C17Rik NM_175108 | 315 | −1.9720 | −1.5260 | −1.7490 | 0.3154 |
| A_52_P252007 | Similar to Ac2-008 LOC544824 XM_618949 | 316 | −1.0820 | −2.4210 | −1.7515 | 0.9468 |
| A_51_P450957 | Actin, alpha 2, smooth muscle, aorta Acta2 NM_007392 | 101 | −0.1270 | −3.3870 | −1.7570 | 2.3052 |
| A_52_P418477 | Tropomyosin 2, beta Tpm2 NM_009416 | 317 | −0.9320 | −2.5950 | −1.7635 | 1.1759 |
| A_51_P409988 | RIKEN cDNA C530009C10 gene C530009C10Rik NM_026577 | 318 | −1.7040 | −1.8250 | −1.7645 | 0.0856 |
| A_52_P666930 | Thyroid hormone receptor alpha Thra NM_178060 | 319 | −2.2410 | −1.2930 | −1.7670 | 0.6703 |
| A_51_P224505 | Bcl2-associated athanogene 1 Bag1 NM_009736 | 320 | −1.1760 | −2.3620 | −1.7690 | 0.8386 |
| A_51_P387670 | GTP binding protein 4 Gtpbp4 NM_027000 | 321 | −2.1130 | −1.4590 | −1.7860 | 0.4624 |
| A_51_P160870 | Reticulon 4 Rtn4 NM_194054 | 322 | −1.6000 | −1.9730 | −1.7865 | 0.2638 |
| A_51_P257762 | RIKEN cDNA A930006P13 gene Pcaf AK030070 | 323 | −1.2480 | −2.3430 | −1.7955 | 0.7743 |
| A_51_P343556 | Carnitine deficiency-associated gene expressed in ventricle 3 | 324 | −1.0650 | −2.5300 | −1.7975 | 1.0359 |
| | Cdv3 NM_175565 | | | | | |
| A_52_P430628 | RAB geranylgeranyl transferase, b subunit Rabggtb | 325 | −1.1370 | −2.4660 | −1.8015 | 0.9397 |
| | NM_011231 | | | | | |
| A_51_P401792 | Titin Ttn AK009648 | 282 | −1.6450 | −1.9720 | −1.8085 | 0.2312 |
| A_51_P347452 | HIV TAT specific factor 1 Htatsf1 NM_028242 | 326 | −2.2260 | −1.3920 | −1.8090 | 0.5897 |
| A_51_P259214 | Solute carrier family 39 (metal ion transporter), member 6 | 327 | −2.6540 | −0.9690 | −1.8115 | 1.1915 |
| | Slc39a6 NM_139143 | | | | | |
| A_52_P653684 | Glutamyl-prolyl-tRNA synthetase Eprs BC040802 | 328 | −1.7530 | −1.8720 | −1.8125 | 0.0841 |
| A_51_P338803 | Phosphatidylinositol glycan, class T Pigt NM_133779 | 329 | −2.4900 | −1.1420 | −1.8160 | 0.9532 |
| A_52_P508750 | Granulin Grn NM_008175 | 177 | −2.8730 | −0.7600 | −1.8165 | 1.4941 |
| A_51_P459350 | Destrin Dstn NM_019771 | 330 | −1.4080 | −2.2270 | −1.8175 | 0.5791 |
| A_52_P679966 | Sarcolemma associated protein Slmap AK129403 | 331 | −2.4530 | −1.1820 | −1.8175 | 0.8987 |
| A_52_P443846 | PTPRF interacting protein, binding protein 1 (liprin beta 1) | 332 | −2.6870 | −0.9490 | −1.8180 | 1.2290 |
| | Ppfibp1 NM_026221 | | | | | |
| A_52_P571290 | RIKEN cDNA 2610009E16 gene 2610009E16Rik BC052052 | 333 | −2.4750 | −1.1670 | −1.8210 | 0.9249 |
| A_52_P571684 | Radixin Rdx NM_009041 | 334 | −1.1540 | −2.4990 | −1.8265 | 0.9511 |
| A_52_P461517 | Ubiquitin associated protein 2-like Ubap2l NM_153489 | 335 | −2.1830 | −1.4940 | −1.8385 | 0.4872 |
| A_52_P112182 | Stimulatory G protein alpha subunit {clone WC-16} S49980 | 336 | −0.2440 | −3.4500 | −1.8470 | 2.2670 |
| A_52_P535255 | GCIP-interacting protein p29 Gcipip NM_026780 | 337 | −2.1670 | −1.5480 | −1.8575 | 0.4377 |
| A_52_P420712 | Praja 2, RING-H2 motif containing Pja2 AK122282 | 338 | −1.4070 | −2.3310 | −1.8690 | 0.6534 |
| A_52_P623337 | Nucleolin Ncl NM_010880 | 304 | −1.3390 | −2.4090 | −1.8740 | 0.7566 |
| A_51_P164030 | T-complex protein 1 Tcp1 NM_013686 | 339 | −1.1260 | −2.6220 | −1.8740 | 1.0578 |
| A_51_P198045 | RAB28, member RAS oncogene family Rab28 AK012286 | 39 | −1.9470 | −1.8230 | −1.8850 | 0.0877 |
| A_52_P472958 | RIKEN cDNA 4732497O03 gene 4732497O03Rik NM_144826 | 340 | −2.0910 | −1.6790 | −1.8850 | 0.2913 |
| A_51_P141152 | Sirtuin 1 ((silent mating type information regulation 2, homolog) | 341 | −3.0900 | −0.6830 | −1.8865 | 1.7020 |
| | 1 (S. cerevisiae) Sirt1 NM_019812 | | | | | |
| A_51_P502724 | RIKEN cDNA B430201A12 gene B430201A12Rik AK005412 | 342 | −3.2750 | −0.5250 | −1.9000 | 1.9445 |
| A_51_P479914 | Phosphatidylinositol 3-kinase, catalytic, beta polypeptide Pik3cb | 343 | −3.5070 | −0.3100 | −1.9085 | 2.2606 |
| | NM_029094 | | | | | |
| A_51_P339503 | Chaperonin subunit 4 (delta) Cct4 NM_009837 | 344 | −0.8530 | −2.9870 | −1.9200 | 1.5090 |
| A_51_P214503 | ras1 related extracellular matrix protein 2 Frem2 NM_172862 | 345 | −3.2020 | −0.6400 | −1.9210 | 1.8116 |
| A_52_P524700 | Titin Ttn AK084709 | 346 | −2.1880 | −1.6560 | −1.9220 | 0.3762 |
| A_51_P366890 | Guanosine diphosphate (GDP) dissociation inhibitor 3 Gdi3 | 347 | −1.0810 | −2.7850 | −1.9330 | 1.2049 |
| | NM_008112 | | | | | |
| A_52_P30877 | Similar to high mobility group protein BC054110 | 348 | −1.2600 | −2.6070 | −1.9335 | 0.9525 |
| A_52_P302977 | TAF9 RNA polymerase II, TATA box binding protein (TBP)- | 349 | −1.5650 | −2.3210 | −1.9430 | 0.5346 |
| | associated factor Taf9 NM_027139 | | | | | |
| A_51_P100856 | Fibronectin 1 Fn1 NM_010233 | 221 | −1.6170 | −2.2740 | −1.9455 | 0.4646 |
| A_52_P31687 | RE1-silencing transcription factor Rest NM_011263 | 350 | −2.5440 | −1.3470 | −1.9455 | 0.8464 |
| A_51_P448109 | Calpain 2 Capn2 NM_009794 | 351 | −0.8460 | −3.0730 | −1.9595 | 1.5747 |
| A_51_P320434 | Expressed sequence AI317223 AI317223 NM_001002764 | 352 | −1.9600 | −1.9610 | −1.9605 | 0.0007 |
| A_52_P358505 | RIKEN cDNA 5730485H21 gene 5730485H21Rik AK017709 | 353 | −1.4370 | −2.4880 | −1.9625 | 0.7432 |
| A_51_P391542 | Similar to proteasome alpha7/C8 subunit Psma3 NM_011184 | 354 | −1.5610 | −2.3840 | −1.9725 | 0.5819 |
| A_52_P228932 | Glycogen synthase 3, brain Gys3 NM_030678 | 355 | −2.7810 | −1.1730 | −1.9770 | 1.1370 |
| A_52_P7937 | Phosphatidic acid phosphatase 2a Ppap2a NM_008903 | 356 | −1.9400 | −2.0200 | −1.9800 | 0.0566 |
| A_52_P659477 | Titin Ttn AB100271 | 357 | −2.2450 | −1.7220 | −1.9835 | 0.3698 |
| A_52_P599317 | Heparan sulfate 6-O-sulfotransferase 2 Hs6st2 BC063327 | 358 | −3.0400 | −0.9800 | −2.0100 | 1.4566 |
| A_52_P658974 | Similar to Hmgb1 protein XM_358238 | 359 | −1.2730 | −2.7540 | −2.0135 | 1.0472 |
| A_52_P392598 | RIKEN cDNA 9430072K23 gene Ramp2 AK020134 | 360 | −3.3440 | −0.7020 | −2.0230 | 1.8682 |
| A_51_P224630 | RIKEN cDNA 1190002H09 gene 1190002H09Rik AK004450 | 361 | −1.9600 | −2.0890 | −2.0245 | 0.0912 |
| A_52_P434549 | Apoptotic chromatin condensation inducer 1 Acin1 NM_023190 | 362 | −2.3140 | −1.7750 | −2.0445 | 0.3811 |
| A_52_P615362 | Fibronectin leucine rich transmembrane protein 2 Flrt2 | 363 | −3.4150 | −0.7020 | −2.0585 | 1.9184 |
| | BC067058 | | | | | |
| A_51_P512210 | Myosin, heavy polypeptide 6, cardiac muscle, alpha Myh6 | 364 | −1.6760 | −2.4590 | −2.0675 | 0.5537 |
| | NM_010856 | | | | | |
| A_52_P464193 | Integrin-linked kinase-associated serine/threonine phosphatase | 365 | −2.0350 | −2.1080 | −2.0715 | 0.0516 |
| | 2C Ilkap NM_023343 | | | | | |
| A_52_P299231 | Solute carrier family 25 (mitochondrial carrier, phosphate | 366 | −1.2710 | −2.8770 | −2.0740 | 1.1356 |
| | carrier), member 3 Slc25a3 AK028313 | | | | | |
| A_51_P218535 | Nebulin Neb X70032 | 367 | −2.0240 | −2.1350 | −2.0795 | 0.0785 |
| A_52_P520439 | Phosphatidylethanolamine binding protein Gnaq NM_018858 | 368 | −1.7950 | −2.3710 | −2.0830 | 0.4073 |
| A_51_P486121 | AF4/FMR2 family, member 3 Aff3 AK209098 | 230 | −2.9500 | −1.2200 | −2.0850 | 1.2233 |
| A_52_P527944 | Protein tyrosine phosphatase, receptor type Z, polypeptide 1 | 172 | −3.5600 | −0.6180 | −2.0890 | 2.0803 |
| | Ptprz1 AJ428208 | | | | | |
| A_51_P161225 | DEAD box polypeptide 46 Ddx46 AK008639 | 369 | −2.3690 | −1.8110 | −2.0900 | 0.3946 |
| A_51_P247883 | Procollagen, type V, alpha 2 Col5a2 NM_007737 | 370 | −3.2350 | −0.9610 | −2.0980 | 1.6080 |
| A_52_P313185 | Synaptic vesicle glycoprotein 2 b Sv2b NM_153579 | 371 | −3.4640 | −0.7460 | −2.1050 | 1.9219 |
| A_51_P515026 | Kidney cell line derived transcript 1 Kdt1 NM_175088 | 372 | −2.2080 | −2.0850 | −2.1465 | 0.0870 |
| A_52_P644452 | Dedicator of cytokinesis 9 Dock9 AK122431 | 373 | −3.3720 | −0.9290 | −2.1505 | 1.7275 |
| A_52_P646312 | Pleckstrin homology domain containing, family A member 5 | 374 | −2.8890 | −1.4330 | −2.1610 | 1.0295 |
| | Plekha5 NM_144920 | | | | | |
| A_51_P115953 | 7 days neonate cerebellum cDNA, RIKEN full-length enriched | 375 | −1.4450 | −2.8860 | −2.1655 | 1.0189 |
| | library, clone: A730024G14 product: weakly similar to | | | | | |
| | CORTEXIN [Rattus norvegicus], full insert sequence AK042789 | | | | | |
| A_52_P630493 | DnaJ (Hsp40) homolog, subfamily B, member 6 Dnajb6 | 376 | −3.0640 | −1.2740 | −2.1690 | 1.2657 |
| | NM_011847 | | | | | |
| A_52_P379337 | Reticulon 4 Rtn4 NM_194054 | 322 | −1.9050 | −2.4400 | −2.1725 | 0.3783 |
| A_52_P675052 | Golgi autoantigen, golgin subfamily b, macrogolgin 1 Golgb1 | 138 | −2.4220 | −1.9480 | −2.1850 | 0.3352 |
| | XM_148244 | | | | | |
| A_51_P495331 | Neulin Neb AF203898 XM_130232 | 377 | −1.9880 | −2.4030 | −2.1955 | 0.2934 |
| A_52_P69998 | KDEL endoplasmic reticulum protein retention receptor 2 Kdelr2 | 378 | −3.8100 | −0.6050 | −2.2075 | 2.2663 |
| | NM_025841 | | | | | |
| A_52_P49453 | TIGR Accession No. TC1413911 | 379 | −2.7510 | −1.6770 | −2.2140 | 0.7594 |
| A_51_P108525 | Pleckstrin homology domain containing, family A | 380 | −4.0360 | −0.4190 | −2.2275 | 2.5576 |
| | (phosphoinositide binding specific) member 3 Plekha3 | | | | | |
| | NM_031256 | | | | | |
| A_52_P299505 | protein synthesis elongation factor Tu eEF-Tu, eEf-1-alpha | 381 | −0.8610 | −3.6060 | −2.2335 | 1.9410 |
| | mRNA M22432 | | | | | |
| A_51_P224534 | AHNAK nucleoprotein (desmoyokin) Ahnak NM_009643 | 169 | −1.7300 | −2.7530 | −2.2415 | 0.7234 |
| A_52_P172665 | RIKEN cDNA 4921533L14 gene 4921533L14Rik NM_026604 | 382 | −3.8720 | −0.6400 | −2.2560 | 2.2854 |
| A_52_P12877 | Heat shock protein 8 Hspa8 NM_031165 | 383 | −0.8660 | −3.6510 | −2.2585 | 1.9693 |
| A_52_P115191 | Similar to hypothetical protein 1 (rRNA external transcribed | 195 | −2.6030 | −1.9380 | −2.2705 | 0.4702 |
| | spacer) - mouse; LOC434481 XM_486315 | | | | | |
| A_51_P165504 | Twist homolog 2 (Drosophila) Twist2 NM_007855 | 384 | −4.1330 | −0.4310 | −2.2820 | 2.6177 |
| A_51_P272046 | Catenin beta Catnb NM_007614 | 385 | −1.9950 | −2.5730 | −2.2840 | 0.4087 |
| A_52_P240561 | Zinc finger protein 75 Zfp75 NM_172918 | 386 | −1.9600 | −2.6380 | −2.2990 | 0.4794 |
| A_51_P377094 | Procollagen, type I, alpha 1 Col1a1 NM_007742 | 222 | −4.0780 | −0.7130 | −2.3955 | 2.3794 |
| A_51_P186856 | Keratin complex 2, basic, gene 5 Krt2-5 NM_027011 | 387 | −0.2540 | −4.6270 | −2.4405 | 3.0922 |
| A_52_P249402 | Prothymosin alpha Ptma NM_008972 | 207 | −4.1740 | −0.8440 | −2.5090 | 2.3547 |
| A_51_P118637 | RIKEN cDNA 3110050K21 gene 3110050K21Rik AK078225 | 388 | −2.2050 | −2.9210 | −2.5630 | 0.5063 |
| A_52_P311417 | Luc7 homolog (S. cerevisiae)-like Luc7l NM_028190 | 389 | −3.8090 | −1.4190 | −2.6140 | 1.6900 |
| A_52_P421357 | Restin (Reed-Steinberg cell-expressed intermediate filament- | 390 | −3.4170 | −1.8150 | −2.6160 | 1.1328 |
| | associated protein) Rsn NM_019765 | | | | | |
| A_51_P111285 | Keratin complex 1, acidic, gene 10 Krt1-10 NM_010660 | 391 | −1.0160 | −4.4980 | −2.7570 | 2.4621 |
| A_52_P569906 | Titin Ttn AB100271 | 392 | −2.6460 | −2.9320 | −2.7890 | 0.2022 |
| A_51_P356705 | Pleckstrin homology domain containing, family B (evectins) | 393 | −4.9470 | −0.6400 | −2.7935 | 3.0455 |
| | member 2 Plekhb2 NM_145516 | | | | | |
| A_51_P395652 | Myosin, heavy polypeptide 2, skeletal muscle, adult Myh2 | 208 | −3.1670 | −2.6900 | −2.9285 | 0.3373 |
| | NM_144961 | | | | | |
| A_51_P495269 | Loricrin Lor NM_008508 | 226 | −0.4240 | −6.4160 | −3.4200 | 4.2370 |

^{a,b}The data is presented in the same fashion as described hereinabove with respect to Table 1.

### Example 3

### Gene Expression Analysis of Wild Type Mouse Tendon Versus P2Y₁/P2Y₂ Double Knock Out Mouse Tendon

[0209] Mice homozygous for a targeted disruption of the purinergic P2Y₁ receptor (P2Y₁-R) have been described (see Leon et al., 1999). Mice homozygous for the P2Y₁-R knockout (P2Y₁-R) were bred to homozygous P2Y₂-R KO mice, and mice homozygous for both the P2Y₁-R disruption and the P2Y₂-R disruption were identified (referred to herein as “double knockout” or DKO mice). DKO mice appeared to have defects in tendon development, as the tail tendon fascicle of the DKO mice was both wider (17.1 microns vs. 14.3 microns in wild type mice) and had a wavy appearance (whereas the tail tendon fascicle of the wild type mice was straight).

[0210] Achilles tendons were isolated from wild type mice and DKO mice as outlined in EXAMPLE 1. RNA was isolated and cDNAs prepared, with wild type mouse Achilles tendon (AT) RNAs reverse transcribed into cDNAs labeled with Cyanine 3 (a green dye fluorophore; Cy3) and DKO mouse tendon RNAs (DKO) labeled with cyanine 5 (a red dye fluorophore; Cy5). cDNAs from AT or DKO were pooled in equal proportions and hybridized to the Agilent mouse microarray chip. Hybridized arrays were imaged and fluorescence quantitated for each dye and each spot.

[0211] Genes that showed at least a 2 fold difference between wild type and DKO tendon are presented in Table 3. Seven genes, keratin associated protein 16-10 (Krtap 16-10; GENBANK® Accession No. NM_{—}183296), Ioricrin (Lor; GENBANK® Accession No. NM_{—}008508), keratin associated protein 6-1 (Krtap6-1; GENBANK®Accession No. NM_{—}010672), keratin complex 2, basic, gene 5 (Krt2-5; GENBANK® Accession No. NM_{—}027011), keratin associated protein 6-3 (Krtap6-3; GENBANK® Accession No. NM_{—}130866), keratin complex-1, acidic, gene C29 (Krt1-c29; GENBANK® Accession No. NM_{—}010666), and annexin A8 (Anxa8; GENBANK® Accession No. NM_{—}013473) that were upregulated in tendon versus muscle were also upregulated in DKO tendon.

TABLE 3
Comparison of Gene Expression Levels Between Wild Type Mouse Achilles Tendon and
P2Y1/P2Y2 Double Knockout Mouse Achilles Tendon^{a}

| | | | | | | | |
|---|---|---|---|---|---|---|---|
| | | SEQ ID | Experiment | | | | |
| CLID | NAME^{b} | NO: | A | Experiment B | Experiment C | Mean | STDEV |

A. Genes Upregulated at Least Two Fold in P2Y1/P2Y2 Double Knockout Mice

| | | | | | | | |
|---|---|---|---|---|---|---|---|
| A_52_P463962 | Keratin associated protein 16-10 Krtap 16-10 | 394 | 3.4660 | 3.3820 | 3.5570 | 3.4683 | 0.0875 |
| | NM_183296 | | | | | | |
| A_51_P495269 | Loricrin Lor NM_008508 | 226 | 2.9750 | 2.7400 | 2.8960 | 2.8703 | 0.1196 |
| A_51_P204350 | RIKEN cDNA 2310015J09 gene 2310015J09Rik | 395 | 2.3510 | 2.3750 | 2.6200 | 2.4487 | 0.1489 |
| | NM_027983 | | | | | | |
| A_52_P225117 | Keratin associated protein 6-1 Krtap6-1 | 396 | 2.1140 | 2.3340 | 2.5300 | 2.3260 | 0.2081 |
| | NM_010672 | | | | | | |
| A_51_P160673 | Potassium voltage-gated channel, lsk-related | 176 | 1.7330 | 2.0470 | 2.2680 | 2.0160 | 0.2688 |
| | family, member 1-like Kcne1l NM_021487 | | | | | | |
| A_52_P523368 | RIKEN cDNA 2310020A21 gene 2310020A21Rik | 397 | 2.0410 | 1.9020 | 2.0230 | 1.9887 | 0.0756 |
| | NM_175249 | | | | | | |
| A_51_P345073 | RIKEN cDNA 2310020A21 gene 2310020A21Rik | 397 | 1.8590 | 1.8780 | 2.1980 | 1.9783 | 0.1905 |
| | NM_175249 | | | | | | |
| A_52_P479051 | Keratin associated protein 6-1 Krtap6-1 | 396 | 1.9770 | 1.6440 | 2.2670 | 1.9627 | 0.3117 |
| | NM_010672 | | | | | | |
| A_51_P186856 | Keratin complex 2, basic, gene 5 Krt2-5 | 387 | 1.9690 | 1.8140 | 1.9220 | 1.9017 | 0.0795 |
| | NM_027011 | | | | | | |
| A_52_P2259 | Keratin associated protein 6-3 Krtap6-3 | 398 | 1.9030 | 1.8690 | 1.8700 | 1.8807 | 0.0193 |
| | NM_130866 | | | | | | |
| A_52_P270429 | RIKEN cDNA 2200001I15 gene 2200001I15Rik | 192 | 1.6500 | 1.8200 | 1.8180 | 1.7627 | 0.0976 |
| | NM_183278 | | | | | | |
| A_52_P437884 | Mindbomb homolog 1 (Drosophila) Mib1 | 399 | 1.9380 | 1.3670 | 1.5780 | 1.6277 | 0.2887 |
| | BC083072 | | | | | | |
| A_52_P313185 | Synaptic vesicle glycoprotein 2 b Sv2b | 371 | 1.8580 | 1.4420 | 1.4430 | 1.5810 | 0.2399 |
| | NM_153579 | | | | | | |
| A_52_P468068 | RIKEN cDNA 4732442J06 gene 4732442J06Rik | 400 | 1.3250 | 1.6060 | 1.7890 | 1.5733 | 0.2337 |
| | AV240687 | | | | | | |
| A_51_P441898 | RIKEN cDNA 4631426H08 gene 4631426H08Rik | 223 | 1.5620 | 1.5840 | 1.5530 | 1.5663 | 0.0159 |
| | NM_133730 | | | | | | |
| A_52_P22896 | SNF2 histone linker PHD RING helicase Shprh | 401 | 2.4750 | 1.3480 | 0.8700 | 1.5643 | 0.8241 |
| | AK086203 | | | | | | |
| A_52_P587738 | Purinergic receptor P2Y, G-protein coupled 2 | 402 | 1.4950 | 1.5500 | 1.6360 | 1.5603 | 0.0711 |
| | P2ry2 NM_008773 | | | | | | |
| A_51_P359046 | Secreted Ly6/Plaur domain containing 1 Slurp1 | 403 | 1.0000 | 1.5650 | 2.0230 | 1.5293 | 0.5124 |
| | NM_020519 | | | | | | |
| A_51_P412926 | Keratin complex-1, acidic, gene C29 Krt1-c29 | 404 | 1.8450 | 1.4520 | 1.2610 | 1.5193 | 0.2978 |
| | NM_010666 | | | | | | |
| A_51_P207591 | Annexin A8 Anxa8 NM_013473 | 229 | 1.3290 | 1.5270 | 1.6610 | 1.5057 | 0.1670 |
| A_51_P207591 | Annexin A8 Anxa8 NM_013473 | 229 | 1.3090 | 1.4210 | 1.7340 | 1.4880 | 0.2203 |
| A_51_P501844 | Cytochrome P450, family 26, subfamily b, | 405 | 1.6040 | 1.4840 | 1.3720 | 1.4867 | 0.1160 |
| | polypeptide 1 Cyp26b1 NM_175475 | | | | | | |
| A_51_P133684 | Cysteine and glycine-rich protein 3 Csrp3 | 143 | 1.4210 | 1.5180 | 1.4860 | 1.4750 | 0.0494 |
| | NM_013808 | | | | | | |
| A_51_P207591 | Annexin A8 Anxa8 NM_013473 | 229 | 1.3100 | 1.4640 | 1.6330 | 1.4690 | 0.1616 |
| A_51_P207591 | Annexin A8 Anxa8 NM_013473 | 229 | 1.2960 | 1.3990 | 1.6740 | 1.4563 | 0.1954 |
| A_51_P207591 | Annexin A8 Anxa8 NM_013473 | 229 | 1.1620 | 1.5230 | 1.6610 | 1.4487 | 0.2577 |
| A_51_P207591 | Annexin A8 Anxa8 NM_013473 | 229 | 1.3590 | 1.3280 | 1.6170 | 1.4347 | 0.1587 |
| A_51_P111285 | Keratin complex 1, acidic, gene 10 Krt1-10 | 391 | 1.3990 | 1.3700 | 1.5340 | 1.4343 | 0.0875 |
| | NM_010660 | | | | | | |
| A_51_P207591 | Annexin A8 Anxa8 NM_013473 | 229 | 1.1540 | 1.4410 | 1.7040 | 1.4330 | 0.2751 |
| A_51_P287635 | Purinergic receptor P2Y, G-protein coupled 2 | 402 | 1.6160 | 1.4640 | 1.2120 | 1.4307 | 0.2041 |
| | P2ry2 NM_008773 | | | | | | |
| A_51_P207591 | Annexin A8 Anxa8 NM_013473 | 229 | 1.2740 | 1.4360 | 1.5570 | 1.4223 | 0.1420 |
| A_51_P115953 | RIKEN cDNA A730024G14 gene A730024G14Rik | 406 | 1.7010 | 1.4080 | 1.1440 | 1.4177 | 0.2786 |
| | AK042789 | | | | | | |
| A_51_P232207 | Homeo box B6 Hoxb6 NM_008269 | 407 | 2.5750 | 1.0740 | 0.5770 | 1.4087 | 1.0402 |
| A_51_P207622 | Fibromodulin Fmod NM_021355 | 139 | 1.7690 | 1.2200 | 1.1880 | 1.3923 | 0.3266 |
| A_52_P573336 | Suprabasin Sbsn NM_172205 | 408 | 1.2080 | 1.2650 | 1.6620 | 1.3783 | 0.2473 |
| A_51_P267053 | Thrombospondin 3 Thbs3 NM_013691 | 409 | 1.4170 | 1.3280 | 1.3650 | 1.3700 | 0.0447 |
| A_51_P105078 | S100 calcium binding protein A4 S100a4 | 232 | 1.0120 | 1.4870 | 1.5630 | 1.3540 | 0.2986 |
| | NM_011311 | | | | | | |
| A_51_P506417 | Keratin complex 1, acidic, gene 14 Krt1-14 | 410 | 1.5020 | 1.1610 | 1.3890 | 1.3507 | 0.1737 |
| | NM_016958 | | | | | | |
| A_52_P570487 | Olfactory receptor 1344 Olfr1344 NM_177061 | 411 | 0.0180 | 3.6960 | 0.3340 | 1.3493 | 2.0384 |
| A_51_P205907 | Filamin C, gamma (actin binding protein 280) Flnc | 412 | 2.1580 | 1.1720 | 0.6700 | 1.3333 | 0.7570 |
| | XM_284175 | | | | | | |
| A_52_P686785 | P686785 Extra cellular link domain-containing 1 | 413 | 1.1530 | 1.2620 | 1.5840 | 1.3330 | 0.2241 |
| | Xlkd1 NM_053247 | | | | | | |
| A_52_P455295 | HCF-binding transcription factor Zhangfei | 414 | 1.6120 | 1.2330 | 1.1300 | 1.3250 | 0.2538 |
| | MGI: 2675296 NM_145151 | | | | | | |
| A_52_P335064 | Musculoskeletal, embryonic nuclear protein 1 | 415 | 1.4190 | 1.3810 | 1.1730 | 1.3243 | 0.1324 |
| | Mustn1 NM_181390 | | | | | | |
| A_52_P131062 | Keratin associated protein 8-1 Krtap8-1 AA739048 | 416 | 1.1430 | 1.4800 | 1.2130 | 1.2787 | 0.1778 |
| A_51_P207591 | Annexin A8 Anxa8 NM_013473 | 229 | 1.1300 | 1.2540 | 1.4270 | 1.2703 | 0.1492 |
| A_51_P364639 | Keratin complex 2, basic, gene 6g Krt2-6g | 235 | 1.2050 | 1.3140 | 1.2880 | 1.2690 | 0.0569 |
| | NM_019956 | | | | | | |
| A_51_P122321 | RIKEN cDNA 9230117N10 gene 9230117N10Rik | 417 | 1.0830 | 1.3090 | 1.3640 | 1.2520 | 0.1489 |
| | NM_133775 | | | | | | |
| A_52_P634111 | Hypothetical protein D930020L01 AK086316 | 418 | 1.4690 | 1.3450 | 0.9280 | 1.2473 | 0.2834 |
| A_51_P346445 | Heat shock protein family, member 7 | 419 | 1.3300 | 1.3720 | 0.9910 | 1.2310 | 0.2089 |
| | (cardiovascular) Hspb7 NM_013868 | | | | | | |
| A_51_P207591 | Annexin A8 Anxa8 NM_013473 | 229 | 1.0870 | 1.1070 | 1.4930 | 1.2290 | 0.2288 |
| A_51_P196844 | Oxysterol binding protein-like 3 Osbpl3 | 420 | 1.3410 | 1.0340 | 1.2720 | 1.2157 | 0.1611 |
| | NM_027881 | | | | | | |
| A_51_P346445 | Heat shock protein family, member 7 | 419 | 1.5310 | 1.1930 | 0.8980 | 1.2073 | 0.3167 |
| | (cardiovascular) Hspb7 NM_013868 | | | | | | |
| A_51_P349961 | Group specific component Gc NM_008096 | 421 | 1.9730 | 0.9430 | 0.7030 | 1.2063 | 0.6747 |
| A_52_P543684 | Kallikrein 26 Klk26 NM_010644 | 422 | 0.9810 | 1.3040 | 1.3290 | 1.2047 | 0.1941 |
| A_51_P184331 | Sodium channel, voltage-gated, type III, beta | 423 | 1.1850 | 1.0810 | 1.3270 | 1.1977 | 0.1235 |
| | Scn3b BC058636 | | | | | | |
| A_51_P313561 | Lamin A Lmna NM_019390 | 424 | 1.5420 | 0.9830 | 1.0450 | 1.1900 | 0.3064 |
| A_52_P380379 | Uncoupling protein 3, mitochondrial Ucp3 | 425 | 1.2410 | 0.9340 | 1.3750 | 1.1833 | 0.2261 |
| | NM_009464 | | | | | | |
| A_52_P592305 | Potassium voltage gated channel, Shaw-related | 426 | 1.7380 | 0.8240 | 0.9750 | 1.1790 | 0.4900 |
| | subfamily, member 1 Kcnc1 NM_008421 | | | | | | |
| A_51_P346445 | Heat shock protein family, member 7 | 419 | 1.5300 | 1.0270 | 0.9450 | 1.1673 | 0.3167 |
| | (cardiovascular) Hspb7 NM_013868 | | | | | | |
| A_52_P588483 | Fibulin 1 Fbln1 NM_010180 | 165 | 1.2090 | 1.1000 | 1.1130 | 1.1407 | 0.0595 |
| A_51_P395309 | Kallikrein 5 Klk5 NM_008456 | 182 | 0.9560 | 1.2680 | 1.1960 | 1.1400 | 0.1634 |
| A_51_P446510 | Epithelial membrane protein 3 Emp3 NM_010129 | 427 | 1.2490 | 1.0150 | 1.1270 | 1.1303 | 0.1170 |
| A_51_P505530 | Tenascin XB Tnxb NM_031176 | 428 | 1.0640 | 1.2480 | 1.0640 | 1.1253 | 0.1062 |
| A_52_P534355 | RIKEN cDNA A630042F09 A630042F09Rik | 429 | 1.1170 | 1.0610 | 1.1970 | 1.1250 | 0.0684 |
| | AK041855 | | | | | | |
| A_51_P375558 | Myocilin Myoc NM_010865 | 430 | 1.3750 | 0.9220 | 1.0750 | 1.1240 | 0.2304 |
| A_51_P346445 | Heat shock protein family, member 7 | 419 | 1.3820 | 1.0190 | 0.9690 | 1.1233 | 0.2254 |
| | (cardiovascular) Hspb7 NM_013868 | | | | | | |
| A_51_P416647 | Kallikrein 13 Klk13 NM_010115 | 135 | 0.9430 | 1.0410 | 1.3710 | 1.1183 | 0.2242 |
| A_51_P448236 | Cathepsin K Ctsk NM_007802 | 431 | 1.3690 | 0.9090 | 1.0740 | 1.1173 | 0.2330 |
| A_51_P426353 | Uncoupling protein 1, mitochondrial Ucp1 | 432 | 1.1170 | 1.2190 | 1.0010 | 1.1123 | 0.1091 |
| | NM_009463 | | | | | | |
| A_52_P213909 | Hemoglobin, beta adult major chain Hbb-b1 | 4 | 0.7730 | 1.2490 | 1.3070 | 1.1097 | 0.2930 |
| | NM_008220 | | | | | | |
| A_51_P358765 | Secreted phosphoprotein 1 Spp1 NM_009263 | 224 | 1.3240 | 0.8750 | 1.1250 | 1.1080 | 0.2250 |
| A_51_P492456 | Hyaluronan synthase1 Has1 NM_008215 | 433 | 0.9900 | 1.0620 | 1.2440 | 1.0987 | 0.1309 |
| A_51_P346445 | Heat shock protein family, member 7 | 419 | 1.3330 | 1.0840 | 0.8730 | 1.0967 | 0.2303 |
| | (cardiovascular) Hspb7 NM_013868 | | | | | | |
| A_51_P346445 | Heat shock protein family, member 7 | 419 | 1.3580 | 1.0850 | 0.8450 | 1.0960 | 0.2567 |
| | (cardiovascular) Hspb7 NM_013868 | | | | | | |
| A_51_P220150 | FK506 binding protein 12-rapamycin associated | 231 | 1.4880 | 1.0320 | 0.7660 | 1.0953 | 0.3651 |
| | protein 1 Frap1 BC023373 | | | | | | |
| A_51_P157083 | Growth arrest specific 1 Gas1 NM_008086 | 434 | 1.4550 | 0.9630 | 0.8570 | 1.0917 | 0.3191 |
| A_51_P151732 | Plakophilin 1 Pkp1 NM_019645 | 435 | 1.1290 | 1.0440 | 1.0710 | 1.0813 | 0.0434 |
| A_51_P135517 | Coagulation factor C homolog (Limulus | 436 | 0.9120 | 1.0880 | 1.2340 | 1.0780 | 0.1612 |
| | polyphemus) Coch NM_007728 | | | | | | |
| A_51_P346445 | Heat shock protein family, member 7 | 419 | 1.4930 | 1.0210 | 0.7150 | 1.0763 | 0.3919 |
| | (cardiovascular) Hspb7 NM_013868 | | | | | | |
| A_51_P475049 | Ubiquitin carboxy-terminal hydrolase L1 Uchl1 | 209 | 1.0600 | 0.9290 | 1.2240 | 1.0710 | 0.1478 |
| | NM_011670 | | | | | | |
| A_52_P218058 | C-type lectin domain family 5, member a Clec5a | 437 | 1.1100 | 1.0070 | 1.0880 | 1.0683 | 0.0542 |
| | AK046600 | | | | | | |
| A_52_P62085 | Cathepsin Z Ctsz NM_022325 | 438 | 1.4570 | 0.9500 | 0.7940 | 1.0670 | 0.3466 |
| A_51_P406328 | Serine (or cysteine) proteinase inhibitor, clade B, | 439 | 1.2910 | 1.0370 | 0.8660 | 1.0647 | 0.2138 |
| | member 6c Serpinb6c NM_148942 | | | | | | |
| A_52_P257204 | Heat shock protein 1, beta Hspcb NM_008302 | 440 | 1.5370 | 1.1510 | 0.5040 | 1.0640 | 0.5220 |
| A_51_P218924 | RIKEN cDNA 1110008E08 gene 1110008E08Rik | 441 | 1.3970 | 0.8260 | 0.9630 | 1.0620 | 0.2981 |
| | AK003565 | | | | | | |
| A_52_P229536 | CD44 antigen Cd44 AK045226 | 442 | 1.1420 | 1.0790 | 0.9590 | 1.0600 | 0.0930 |
| A_51_P246924 | RIKEN cDNA 2700055K07 gene 2700055K07Rik | 443 | 1.3170 | 0.9680 | 0.8780 | 1.0543 | 0.2319 |
| | NM_026481 | | | | | | |
| A_51_P447874 | Heat shock protein family, member 7 | 419 | 1.1070 | 1.0110 | 1.0390 | 1.0523 | 0.0494 |
| | (cardiovascular) Hspb7 NM_013868 | | | | | | |
| A_51_P237893 | Integrin beta 3 Itgb3 NM_016780 | 444 | 1.2210 | 0.9250 | 1.0040 | 1.0500 | 0.1533 |
| A_52_P533707 | Cholinergic receptor, nicotinic, alpha polypeptide 1 | 445 | 1.0870 | 1.0570 | 0.9750 | 1.0397 | 0.0580 |
| | (muscle) Chrna1 NM_007389 | | | | | | |
| A_51_P170059 | Small proline rich-like 10 Sprrl10 NM_025420 | 446 | 1.2860 | 0.8720 | 0.9600 | 1.0393 | 0.2181 |
| A_51_P346445 | Heat shock protein family, member 7 | 419 | 1.3270 | 0.8950 | 0.8780 | 1.0333 | 0.2545 |
| | (cardiovascular) Hspb7 NM_013868 | | | | | | |
| A_51_P364788 | Myosin, heavy polypeptide 1, skeletal muscle, | 447 | 1.5260 | 1.1020 | 0.4480 | 1.0253 | 0.5431 |
| | adult Myh1 XM_354615 | | | | | | |
| A_51_P283473 | RIKEN cDNA 1110018M03 gene 1110018M03Rik | 448 | 1.0570 | 0.7470 | 1.2610 | 1.0217 | 0.2588 |
| | NM_026271 | | | | | | |
| A_51_P347965 | Agouti related protein Agrp NM_007427 | 449 | 1.1760 | 0.7760 | 1.0700 | 1.0073 | 0.2072 |
| A_51_P236287 | Scaffold attachment factor B Safb AK087504 | 450 | 1.4750 | 1.0150 | 0.5240 | 1.0047 | 0.4756 |
| A_51_P462271 | Aggrecan 1 Agc1 NM_007424 | 451 | 0.8220 | 1.0590 | 1.1300 | 1.0037 | 0.1613 |
| A_52_P105537 | Nephroblastoma overexpressed gene Nov | 452 | 1.2660 | 0.9040 | 0.8350 | 1.0017 | 0.2315 |
| | NM_010930 | | | | | | |
| A_51_P356942 | Tripartite motif-containing 55 Trim55 XM_355438 | 453 | 1.2100 | 0.7340 | 1.0580 | 1.0007 | 0.2431 |
| A_52_P111390 | 3-phosphoinositide dependent protein kinase-1 | 454 | 1.1550 | 0.8000 | 1.0450 | 1.0000 | 0.1817 |
| | Pdpk1 NM_011062 | | | | | | |

B. Genes Downregulated at Least Two Fold in P2Y1/P2Y2 Double Knockout Mice

| | | | | | | | |
|---|---|---|---|---|---|---|---|
| A_52_P249544 | DNA segment, Chr 5, Brigham & Women's | 455 | −1.9510 | −0.1980 | −0.8850 | −1.0113 | 0.8833 |
| | Genetics 0860 expressed D5Bwg0860e | | | | | | |
| | NM_027530 | | | | | | |
| A_52_P620290 | Establishment of cohesion 1 homolog 1 (S. cerevisiae) | 456 | −1.0070 | −0.8320 | −1.2030 | −1.0140 | 0.1856 |
| | Esco1 BC008220 | | | | | | |
| A_51_P338485 | Aldehyde dehydrogenase family 6, subfamily A1 | 457 | −0.9380 | −1.0760 | −1.0550 | −1.0230 | 0.0744 |
| | Aldh6a1 NM_134042 | | | | | | |
| A_52_P138126 | 6-phosphofructo-2-kinase/fructose-2,6- | 458 | −1.2350 | −0.6930 | −1.1580 | −1.0287 | 0.2932 |
| | biphosphatase 3 Pfkfb3 NM_133232 | | | | | | |
| A_52_P241742 | RIKEN cDNA 2010003O02 gene 2010003O02Rik | 459 | −1.4710 | −0.9070 | −0.7100 | −1.0293 | 0.3950 |
| | AK008077 | | | | | | |
| A_52_P490863 | Nucleolar protein family A, member 3 Nola3 | 460 | −1.2500 | −0.9120 | −0.9450 | −1.0357 | 0.1864 |
| | NM_025403 | | | | | | |
| A_52_P536947 | Cytoplasmic FMR1 interacting protein 2 Cyfip2 | 461 | −0.8480 | −1.0820 | −1.1840 | −1.0380 | 0.1723 |
| | NM_133769 | | | | | | |
| A_51_P282268 | Small nuclear RNA activating complex, | 462 | −0.9210 | −1.2020 | −1.0650 | −1.0627 | 0.1405 |
| | polypeptide 1 Snapc1 NM_178392 | | | | | | |
| A_52_P115787 | Growth factor receptor bound protein 10 Grb10 | 463 | −1.0920 | −0.7340 | −1.3650 | −1.0637 | 0.3165 |
| | NM_010345 | | | | | | |
| A_52_P402761 | Establishment of cohesion 1 homolog 1 (S. cerevisiae) | 464 | −1.0600 | −0.7620 | −1.3770 | −1.0663 | 0.3075 |
| | Esco1 XM_484702 | | | | | | |
| A_52_P254817 | Resistin like alpha Retnla NM_020509 | 465 | −1.0950 | −1.1330 | −0.9850 | −1.0710 | 0.0769 |
| A_51_P512072 | Aminolevulinate, delta-, dehydratase Alad | 466 | −0.8350 | −1.1580 | −1.2260 | −1.0730 | 0.2089 |
| | NM_008525 | | | | | | |
| A_51_P189334 | TIGR Accession No. TC1414310 | 467 | −1.2830 | −0.8660 | −1.0920 | −1.0803 | 0.2087 |
| A_51_P511015 | Frizzled homolog 9 (Drosophila) Fzd9 AK021164 | 468 | −1.2030 | −1.2030 | −0.8970 | −1.1010 | 0.1767 |
| A_52_P168097 | ATPase, Ca++ transporting, cardiac muscle, slow | 469 | −0.7390 | −0.9170 | −1.6640 | −1.1067 | 0.4908 |
| | twitch 2 Atp2a2 NM_009722 | | | | | | |
| A_52_P81038 | Similar to RIKEN cDNA 4832428D23 gene | 470 | −0.9450 | −1.2110 | −1.1770 | −1.1110 | 0.1448 |
| | LOC433294 AK041301 | | | | | | |
| A_52_P1101647 | Ankyrin repeat and SOCS box-containing protein | 471 | −0.9440 | −1.2250 | −1.1820 | −1.1170 | 0.1514 |
| | 15 Asb15 AK079418 | | | | | | |
| A_52_P40777 | Rho GTPase activating protein 12 Arhgap12 | 472 | −0.6940 | −1.1030 | −1.5970 | −1.1313 | 0.4522 |
| | AK037784 | | | | | | |
| A_51_P408989 | RIKEN cDNA 2810055F11 gene 2810055F11Rik | 473 | −1.1770 | −1.1250 | −1.2020 | −1.1680 | 0.0393 |
| | NM_026038 | | | | | | |
| A_51_P357606 | Phytanoyl-CoA dioxygenase domain containing 1 | 474 | −1.3340 | −1.2820 | −0.9310 | −1.1823 | 0.2192 |
| | Phyhd1 NM_172267 | | | | | | |
| A_51_P389265 | Adiponutrin Adpn NM_054088 | 475 | −1.2810 | −1.2770 | −1.0670 | −1.2083 | 0.1224 |
| A_51_P439426 | acetyl-Coenzyme A carboxylase alpha Acac | 476 | −1.7690 | −1.0400 | −0.9340 | −1.2477 | 0.4546 |
| | NM_133360 | | | | | | |
| A_51_P140237 | Four and a half LIM domains 2 Fhl2 NM_010212 | 477 | −1.5080 | −1.5360 | −0.8530 | −1.2990 | 0.3865 |
| A_51_P212491 | 6-phosphofructo-2-kinase/fructose-2,6- | 458 | −1.3170 | −1.3830 | −1.2800 | −1.3267 | 0.0522 |
| | biphosphatase 3 Pfkfb3 NM_133232 | | | | | | |
| A_52_P395228 | Nicotinamide nucleotide transhydrogenase Nnt | 478 | −1.4990 | −1.2990 | −1.2180 | −1.3387 | 0.1446 |
| | NM_008710 | | | | | | |
| A_51_P451075 | ATPase, Ca++ transporting, cardiac muscle, slow | 469 | −1.3930 | −1.3400 | −1.3490 | −1.3607 | 0.0284 |
| | twitch 2 Atp2a2 NM_009722 | | | | | | |
| A_51_P387239 | Interferon inducible GTPase 1 ligp1 NM_021792 | 479 | −1.5740 | −1.6010 | −1.0210 | −1.3987 | 0.3273 |
| A_51_P465582 | Haloacid dehalogenase-like hydrolase domain | 480 | −1.8530 | −1.2230 | −1.1830 | −1.4197 | 0.3758 |
| | containing 3 Hdhd3 NM_024257 | | | | | | |
| A_51_P470715 | Cytokine inducible SH2-containing protein Cish | 481 | −1.2390 | −1.7290 | −1.3000 | −1.4227 | 0.2670 |
| | NM_009895 | | | | | | |
| A_52_P171166 | cDNA sequence BC048679 BC048679 | 482 | −1.6960 | −1.3070 | −1.3690 | −1.4573 | 0.2090 |
| | NM_183143 | | | | | | |
| A_51_P123879 | Steroid 5 alpha-reductase 2-like 2 Srd5a2l2 | 483 | −1.8060 | −1.3600 | −1.8480 | −1.6713 | 0.2704 |
| | NM_153801 | | | | | | |
| A_51_P110830 | A disintegrin-like and metalloprotease (reprolysin | 216 | −1.9670 | −1.4160 | −1.7400 | −1.7077 | 0.2769 |
| | type) with thrombospondin type 1 motif, 8 Adamts8 | | | | | | |
| | NM_013906 | | | | | | |
| A_52_P413395 | Sarcolipin Sln NM_025540 | 161 | −1.8150 | −1.7600 | −1.5900 | −1.7217 | 0.1173 |
| A_52_P100252 | Fatty acid synthase Fasn AK080374 | 484 | −1.1940 | −1.8030 | −2.2670 | −1.7547 | 0.5381 |
| A_51_P161308 | Solute carrier family 22 (organic cation | 485 | −1.8190 | −2.0430 | −1.6100 | −1.8240 | 0.2165 |
| | transporter), member 2 Slc22a2 NM_013667 | | | | | | |
| A_51_P408729 | 3-phosphoglycerate dehydrogenase Phgdh | 486 | −1.7310 | −1.9680 | −1.9010 | −1.8667 | 0.1222 |
| | NM_016966 | | | | | | |
| A_52_P509020 | A disintegrin-like and metalloprotease (reprolysin | 216 | −2.3950 | −1.5440 | −1.7300 | −1.8897 | 0.4474 |
| | type) with thrombospondin type 1 motif, 8 Adamts8 | | | | | | |
| | NM_013906 | | | | | | |
| A_51_P321126 | Fatty acid synthase Fasn AK080374 | 484 | −1.1730 | −2.1560 | −2.4010 | −1.9100 | 0.6499 |
| A_52_P547662 | Purinergic receptor P2Y, G-protein coupled 1 | 487 | −3.9400 | −3.5340 | −3.9930 | −3.8223 | 0.2511 |
| | P2ry1 NM_008772 | | | | | | |
| A_51_P239673 | Hypoxanthine guanine phosphoribosyl transferase | 488 | −4.2080 | −4.6210 | −4.8350 | −4.5547 | 0.3187 |
| | 1 Hprt1 NM_013556 | | | | | | |

^{a,b}The data is presented in the same fashion as described hereinabove with respect to Tables 1 and 2.

### Example 4

### Gene Expression Analysis of Human Tenocytes with and without Exposure to Interleukin 1β

[0212] Human tendon epitenon cells from the flexor digitorum profundus (FDP) were collected from surgical specimens and were maintained in Medium 199 (GIBCO®, Invitrogen Corp., Carlsbad, Calif., United States of America) containing 10% fetal bovine serum (FBS; HyClone, Logan, Utah, United States of America), 20 mM Hepes (pH 7.2; GIBCO®), 1% penicillin/streptomycin solution (GIBCO®). Cells were allowed to attach and spread for 24 hours before addition of 100 pM recombinant human IL-1β (rhIL-1β). The serum concentration was reduced from 10% to 2% upon addition of rhIL-1β. Culture medium was changed daily. Cells at passage 3 were treated with 100 pM IL-1β for 6 hours, and untreated cells after an equivalent time in culture were used as controls.

[0213] For the human tenocytes treated with or without IL-1β, about 3600 genes out of 20 k were changed at least about 2 fold, 1000 genes were changed at least about 4 fold, 275 genes were changed at least about 8 fold, 80 genes were changed at least about 16 fold, 22 genes were changed at least about 32 fold, and 3 genes were changed at least about 64 fold. Expression level differences of some of the MMPs were among the most dramatic changes observed. However, the alteration of mucin gene expression by IL-1β was one of several unexpected findings.

TABLE 4
Comparison of Gene Expression Levels Between Human Tenocytes Exposed In Vitro to
Human Recombinant IL-1β Versus Unexposed Human Tenocytes^{a}

| | | | |
|---|---|---|---|
| | | SEQ | +1L-1β |
| | | ID | vs. |
| CLID | NAME^{b} | NO. | Control |

A. Genes Upregulated at Least Eight Fold by hIL-1β Treatment

| | | | |
|---|---|---|---|
| CGEN_HUM_1006382_1 | CXCL2 Chemokine (C—X—C motif) ligand 2 NM_002089 | 489 | 6.3150 |
| CGEN_HUM_1009916_1 | CXCL3 Chemokine (C—X—C motif) ligand 3 NM_002090 | 490 | 5.5610 |
| CGEN_HUM_1011980_1 | G0S2 Putative lymphocyte G0/G1 switch gene NM_015714 | 491 | 5.5430 |
| CGEN_HUM_1012345_1 | COL1A2 Collagen, type I, alpha 2 L47668 | 492 | 5.2770 |
| CPEROU_OLIGO_32_0 | IL1A Interleukin 1, alpha NM_000575 | 493 | 5.1970 |
| CGEN_HUM_1006519_1 | IL8 Interleukin 8 M17017 | 494 | 5.1050 |
| CGEN_HUM_1007899_1 | TNFAIP2 Tumor necrosis factor, alpha-induced protein 2 NM_006291 | 495 | 5.0750 |
| CGEN_HUM_1008675_1 | COL6A2 Type VI collagen alpha 2 chain precursor M20777; AY029208 | 496 | 5.0680 |
| CGEN_HUM_1006376_1 | PTX3 Pentaxin-related gene, rapidly induced by IL-1 beta NM_002852 | 497 | 5.0230 |
| CGEN_HUM_1000105_1 | IER3 Immediate early response 3 NM_003897 | 498 | 5.0070 |
| CPEROU_OLIGO_633_0 | ADAM15 A disintegrin and metalloproteinase domain 15 (metargidin) AA292676 | 499 | 4.9940 |
| CGEN_HUM_1006393_1 | CSF3 Colony stimulating factor 3 (granulocyte) NM_000759 | 500 | 4.9790 |
| CPEROU_OLIGO_884_0 | MSN Moesin R22977 | 501 | 4.8100 |
| CPEROU_OLIGO_782_0 | FOXC1 Forkhead box C1 N22552 | 502 | 4.8000 |
| CGEN_HUM_1006585_1 | SERPINB2 Serine (or cysteine) proteinase inhibitor, clade B (ovalbumin), member 2 | 503 | 4.7560 |
| | NM_002575 | | |
| CGEN_HUM_1011802_1 | MMP2 Matrix metalloproteinase 2 (gelatinase A, 72 kDa gelatinase, 72 kDa type IV | 504 | 4.7410 |
| | collagenase) X58968 | | |
| CGEN_HUM_1006064_1 | CCL20 Chemokine (C-C motif) ligand 20 NM_004591 | 505 | 4.6790 |
| CPEROU_OLIGO_80_0 | BF B-factor, properdin AA401441 | 506 | 4.6590 |
| CGEN_HUM_1006022_1 | PTGS2 Prostaglandin-endoperoxide synthase 2 (prostaglandin G/H synthase and | 507 | 4.6390 |
| | cyclooxygenase) NM_000963 | | |
| CGEN_HUM_1011318_1 | MAGED2 Melanoma antigen, family D, 2 U92544 | 508 | 4.5690 |
| CGEN_HUM_1018359_1 | Full length insert cDNA clone ZC30C07 AF086184 | 509 | 4.4930 |
| CGEN_HUM_1006490_1 | G1P3 Interferon, alpha-inducible protein (clone IFI-6-16) NM_002038 | 510 | 4.4900 |
| CGEN_HUM_1011497_1 | EFEMP2 EGF-containing fibulin-like extracellular matrix protein 2 NM_016938 | 511 | 4.4640 |
| CGEN_HUM_1010898_1 | SLC39A14 Solute carrier family 39 (zinc transporter), member 14 D31887 | 512 | 4.4080 |
| CGEN_HUM_1007394_1 | MLF2 Myeloid leukemia factor 2 NM_005439 | 513 | 4.4040 |
| CGEN_HUM_1007970_1 | FGF2 Fibroblast growth factor 2 (basic) NM_002006 | 514 | 4.3950 |
| CPEROU_OLIGO_447_0 | HepG2 3′ region Mbol cDNA, clone hmd2a08m3. AA487750 | 515 | 4.3620 |
| CGEN_HUM_1006508_1 | SDF1B cytokine SDF-1-beta U16752 | 516 | 4.3570 |
| CGEN_HUM_1010229_1 | CXCL6 Chemokine (C—X—C motif) ligand 6 (granulocyte chemotactic protein 2) | 517 | 4.2770 |
| | Y08770 | | |
| CGEN_HUM_1007360_1 | LAMP1 Lysosomal-associated membrane protein 1 NM_005561 | 518 | 4.1880 |
| CPEROU_OLIGO_41_0 | MT1X Metallothionein 1X N80129 | 519 | 4.1520 |
| CPEROU_OLIGO_283_0 | HMGA1 High mobility group AT-hook 1 AA448261 | 520 | 4.1080 |
| CGEN_HUM_1006430_1 | IL1A interleukin 1 alpha M28983 | 521 | 4.0760 |
| CGEN_HUM_1009830_1 | TGFBR2 Transforming growth factor, beta receptor II (70/80 kDa) NM_003242 | 522 | 4.0480 |
| CGEN_HUM_1008002_1 | ATF5 Activating transcription factor 5 NM_012068 | 523 | 4.0390 |
| CGEN_HUM_1002530_1 | HNRPUL1 Heterogeneous nuclear ribonucleoprotein U-like 1 NM_007040 | 524 | 4.0350 |
| CGEN_HUM_1008744_1 | CLSTN1 Calsyntenin 1 NM_014944 | 525 | 4.0210 |
| CGEN_HUM_1008447_1 | APP Amyloid beta (A4) precursor protein (protease nexin-II, Alzheimer disease) | 526 | 4.0120 |
| | M35675 | | |
| CGEN_HUM_1017516_1 | INHBA Inhibin, beta A (activin A, activin AB alpha polypeptide) AK001903 | 527 | 4.0040 |
| CGEN_HUM_1009861_1 | GNB2 Guanine nucleotide binding protein (G protein), beta polypeptide 2 | 528 | 3.9610 |
| | NM_005273 | | |
| CGEN_HUM_1008791_1 | PCQAP PC2 (positive cofactor 2, multiprotein complex) glutamine/Q-rich-associated | 529 | 3.9450 |
| | protein NM_015889 | | |
| CGEN_HUM_1002984_1 | EIF4G1 Eukaryotic translation initiation factor 4 gamma, 1 NM_004953 | 530 | 3.9250 |
| CGEN_HUM_1010841_1 | ELN Elastin (supravalvular aortic stenosis, Williams-Beuren syndrome) NM_000501 | 531 | 3.8910 |
| CGEN_HUM_1003129_1 | EHD1 EH-domain containing 1 NM_006795 | 532 | 3.8880 |
| CGEN_HUM_1010565_1 | ADRM1 Adhesion regulating molecule 1 NM_007002 | 533 | 3.8830 |
| CPEROU_OLIGO_609_0 | GENBANK ® Accession No. H69582 | 534 | 3.8710 |
| CGEN_HUM_1008656_1 | COL6A2 type VI collagen alpha 2 chain precursor X15881; AY029208 | 535 | 3.8440 |
| CGEN_HUM_1000304_1 | HAS1 Hyaluronan synthase 1 NM_001523 | 536 | 3.8120 |
| CGEN_HUM_1005956_1 | ARPC1B Actin related protein 2/3 complex, subunit 1B, 41 kDa NM_005720 | 537 | 3.8100 |
| CGEN_HUM_1008636_1 | LTBP3 Latent transforming growth factor beta binding protein 3 AF135960 | 538 | 3.7920 |
| CGEN_HUM_1007887_1 | SMOX Spermine oxidase NM_019025 | 539 | 3.7900 |
| CGEN_HUM_1010254_1 | LAMB2 Laminin, beta 2 (laminin S) NM_002292 | 540 | 3.7810 |
| CGEN_HUM_1009002_1 | TRIP10 Thyroid hormone receptor interactor 10 AJ000414 | 541 | 3.7630 |
| CGEN_HUM_1017411_1 | FBS1 Fibrosin 1 AK022551 | 542 | 3.7410 |
| CGEN_HUM_1006495_1 | CSF2 Colony stimulating factor 2 (granulocyte-macrophage) NM_000758 | 543 | 3.7400 |
| CGEN_HUM_1008484_1 | HUMC6A2A1 alpha-2 collagen type VI, alpha-2 collagen type VI-a, and alpha-2 | 544 | 3.7360 |
| | collagen type VI-a′ gene, exons 6, 5, 4, and 3 M34571 | | |
| CGEN_HUM_1007239_1 | TUBB2 Tubulin, beta 2 NM_001069 | 545 | 3.7130 |
| CPEROU_OLIGO_955_0 | CCL2 Chemokine (C-C motif) ligand 2 AA425102 | 546 | 3.7070 |
| CPEROU_OLIGO_627_0 | CYCS Cytochrome c, somatic NM_018947 | 547 | 3.6750 |
| CGEN_HUM_1002036_1 | JUNB Jun B proto-oncogene NM_002229 | 548 | 3.6750 |
| CGEN_HUM_1006668_1 | SOD2 Superoxide dismutase 2, mitochondrial M36693 | 549 | 3.6720 |
| CGEN_HUM_1007822_1 | MAPK3 Mitogen-activated protein kinase 3 X60188 | 550 | 3.6480 |
| CGEN_HUM_1013195_1 | HUMO40 osteonectin, 5′UTR region D28381 | 551 | 3.5740 |
| CGEN_HUM_1018077_1 | C9orf26 Chromosome 9 open reading frame 26 (NF-HEV) AB024518 | 552 | 3.5540 |
| CGEN_HUM_1008682_1 | HUMC6A2A2 alpha-2 collagen type VI and alpha-2 collagen type VI-a gene, exons | 553 | 3.5440 |
| | 2a and 2b M34572 | | |
| CGEN_HUM_1007336_1 | NBL1 Neuroblastoma, suppression of tumorigenicity 1 NM_005380 | 554 | 3.5250 |
| CPEROU_OLIGO_826_0 | ITM2C Integral membrane protein 2C AA034213 | 555 | 3.5210 |
| CGEN_HUM_1005878_1 | SPATS2 Spermatogenesis associated, serine-rich 2 AK023202 | 556 | 3.5200 |
| CGEN_HUM_1005594_1 | MT2A Metallothionein 2A NM_005953 | 557 | 3.5060 |
| CGEN_HUM_1008786_1 | PRO1855 Hypothetical protein PRO1855 NM_018509 | 558 | 3.5000 |
| CGEN_HUM_1003165_1 | MAP2K2 Mitogen-activated protein kinase kinase 2 L11285 | 559 | 3.4990 |
| CGEN_HUM_1003829_1 | MMP1 Matrix metalloproteinase 1 (interstitial collagenase) NM_002421 | 560 | 3.4800 |
| CGEN_HUM_1012020_1 | ADDA alpha-adducin mRNA, partial sequence, alternatively spliced S70313 | 561 | 3.4680 |
| CGEN_HUM_1008726_1 | CD44 CD44 antigen (homing function and Indian blood group system) M59040 | 562 | 3.4590 |
| CGEN_HUM_1007048_1 | CNOT3 CCR4-NOT transcription complex, subunit 3 NM_014516 | 563 | 3.4550 |
| CPEROU_OLIGO_258_0 | FLOT2 Flotillin 2 R72913 | 564 | 3.4500 |
| CGEN_HUM_1012392_1 | C6orf106 Chromosome 6 open reading frame 106 AF052106 | 565 | 3.4450 |
| CGEN_HUM_1015858_1 | cDNA FLJ13836 fis, clone THYRO1000734 AK023898 | 566 | 3.4350 |
| CGEN_HUM_1009055_1 | LOC440460 X99662 | 567 | 3.4180 |
| CGEN_HUM_1006686_1 | HSPB7 Heat shock 27 kDa protein family, member 7 (cardiovascular) NM_014424 | 568 | 3.4120 |
| CPEROU_OLIGO_952_0 | STAT1 Signal transducer and activator of transcription 1, 91 kDa AA486367 | 569 | 3.4120 |
| CGEN_HUM_1006431_1 | IL1B Interleukin 1, beta M15330 | 570 | 3.4000 |
| CGEN_HUM_1017927_1 | LOC162427 Hypothetical protein LOC162427 L38937 | 571 | 3.3910 |
| CGEN_HUM_1006458_1 | IL1RN Interleukin 1 receptor antagonist M55646 | 572 | 3.3430 |
| CGEN_HUM_1003212_1 | LOXL2 Lysyl oxidase-like 2 NM_002318 | 573 | 3.3420 |
| CGEN_HUM_1011355_1 | NOL6 Nucleolar protein family 6 (RNA-associated) AK025612 | 574 | 3.3390 |
| CGEN_HUM_1011264_1 | TSPYL2 TSPY-like 2 AF273046 | 575 | 3.3380 |
| CGEN_HUM_1009728_1 | IFNAR2 Interferon (alpha, beta and omega) receptor 2 NM_000874 | 576 | 3.3370 |
| CPEROU_OLIGO_698_0 | CORO1C Coronin, actin binding protein, 1C AA126947 | 577 | 3.3330 |
| CGEN_HUM_1006712_1 | MT1L Metallothionein 1L X97261 | 578 | 3.3330 |
| CGEN_HUM_1005168_1 | ABCC1 ATP-binding cassette, sub-family C (CFTR/MRP), member 1 NM_004996 | 579 | 3.3230 |
| CGEN_HUM_1002999_1 | WBSCR1 Williams-Beuren syndrome chromosome region 1 D26068 | 580 | 3.3220 |
| CGEN_HUM_1016751_1 | cDNA DKFZp564E233 (from clone DKFZp564E233) AL049260 | 581 | 3.3120 |
| CGEN_HUM_1017629_1 | FLJ20701 Hypothetical protein FLJ20701 NM_017933 | 582 | 3.3120 |
| CGEN_HUM_1010466_1 | AK026383 FLJ22730 fis, clone HSI15793, highly similar to AF004162 Homo sapiens | 583 | 3.3100 |
| | nickel-specific induction protein (Cap43) AK026383 | | |
| CGEN_HUM_1003426_1 | PPP2R1A Protein phosphatase 2 (formerly 2A), regulatory subunit A (PR 65), alpha | 584 | 3.3040 |
| | isoform NM_014225 | | |
| CGEN_HUM_1009464_1 | PPAP2C Phosphatidic acid phosphatase type 2C NM_003712 | 585 | 3.2970 |
| CPEROU_OLIGO_527_0 | MRPS22 Mitochondrial ribosomal protein S22 N62924 | 586 | 3.2860 |
| CGEN_HUM_1009759_1 | BSG Basigin (OK blood group) NM_001728 | 587 | 3.2670 |
| CGEN_HUM_1007904_1 | PCTK1 PCTAIRE protein kinase 1 NM_006201 | 588 | 3.2480 |
| CPEROU_OLIGO_397_0 | PFKP Phosphofructokinase, platelet AA608558 | 589 | 3.2430 |
| CGEN_HUM_1012268_1 | HIC1 Hypermethylated in cancer 1 NM_006497 | 590 | 3.2200 |
| CPEROU_OLIGO_608_0 | GENBANK ® Accession No. H69582 | 591 | 3.2120 |
| CPEROU_OLIGO_272_0 | GPX3 Glutathione peroxidase 3 (plasma) AA664180 | 592 | 3.2090 |
| CGEN_HUM_1007390_1 | AKT1 V-akt murine thymoma viral oncogene homolog 1 NM_005163 | 593 | 3.2060 |
| CGEN_HUM_1002450_1 | PABPC1 Poly(A) binding protein, cytoplasmic 1 NM_002568 | 594 | 3.2010 |
| CGEN_HUM_1006699_1 | TRA1 Tumor rejection antigen (gp96) 1 NM_003299 | 595 | 3.1970 |
| CGEN_HUM_1008785_1 | ADAMTS7 A disintegrin-like and metalloprotease (reprolysin type) with | 596 | 3.1950 |
| | thrombospondin type 1 motif, 7 AL110226 | | |
| CGEN_HUM_1005849_1 | LOC51238 hypothetical protein LOC51238 NM_016465 | 597 | 3.1900 |
| CPEROU_OLIGO_950_0 | SRPK1 SFRS protein kinase 1 NM_003137 | 598 | 3.1880 |
| CGEN_HUM_1007529_1 | MLLT1 Myeloid/lymphoid or mixed-lineage leukemia (trithorax homolog, Drosophila); | 599 | 3.1870 |
| | translocated to, 1 NM_005934 | | |
| CPEROU_OLIGO_937_0 | RBL2 Retinoblastoma-like 2 (p130) NM_005611 | 600 | 3.1820 |
| CPEROU_OLIGO_454_0 | MGC39900 Hypothetical protein MGC39900 N91887 | 601 | 3.1710 |
| CGEN_HUM_1002039_1 | CEBPB CCAAT/enhancer binding protein (C/EBP), beta NM_005194 | 602 | 3.1660 |
| CGEN_HUM_1006872_1 | SYMPK Symplekin NM_004819 | 603 | 3.1580 |
| CGEN_HUM_1007208_1 | KIF22 Kinesin family member 22 NM_007317 | 604 | 3.1540 |
| CGEN_HUM_1007565_1 | IL15RA Interleukin 15 receptor, alpha NM_002189 | 605 | 3.1450 |
| CGEN_HUM_1010131_1 | STAT1 Signal transducer and activator of transcription 1, 91 kDa NM_007315 | 606 | 3.1420 |
| CGEN_HUM_1009895_1 | GPR Putative G protein coupled receptor NM_007223 | 607 | 3.1310 |
| CGEN_HUM_1007634_1 | PHB Prohibitin NM_002634 | 608 | 3.1240 |
| CGEN_HUM_1018847_1 | VDP Vesicle docking protein p115 NM_003715 | 609 | 3.1160 |
| CGEN_HUM_1002994_1 | EIF5A Eukaryotic translation initiation factor 5A NM_001970 | 610 | 3.1100 |
| CGEN_HUM_1004900_1 | DKFZP564B167 DKFZP564B167 protein NM_015415 | 611 | 3.1060 |
| CPEROU_OLIGO_862_0 | SLC39A6 Solute carrier family 39 (zinc transporter), member 6 H29315 | 612 | 3.0650 |
| CGEN_HUM_1007546_1 | NAB2 NGFI-A binding protein 2 (EGR1 binding protein 2) NM_005967 | 613 | 3.0640 |
| CPEROU_OLIGO_532_0 | C1R Complement component 1, r subcomponent T69603 | 614 | 3.0510 |
| CGEN_HUM_1006456_1 | MCP-3 monocyte chemotactic protein-3 X72308 | 615 | 3.0500 |
| CGEN_HUM_1003896_1 | C1R Complement component 1, r subcomponent NM_001733 | 616 | 3.0400 |
| CGEN_HUM_1011935_1 | MT-1g metallothionein MT-1g isoform S68954 | 617 | 3.0390 |
| CPEROU_OLIGO_71_0 | GENBANK ® Accession No. H66070 | 618 | 3.0330 |
| CGEN_HUM_1008673_1 | TPBG Trophoblast glycoprotein NM_006670 | 619 | 3.0300 |
| CGEN_HUM_1010055_1 | PTK2 PTK2 protein tyrosine kinase 2 NM_005607 | 620 | 3.0170 |
| CGEN_HUM_1004641_1 | PIK4CB Phosphatidylinositol 4-kinase, catalytic, beta polypeptide NM_002651 | 621 | 3.0140 |
| CGEN_HUM_1008056_1 | PPP1CC Protein phosphatase 1, catalytic subunit, gamma isoform NM_002710 | 622 | 3.0140 |
| CPEROU_OLIGO_276_0 | CXCL1 Chemokine (C—X—C motif) ligand 1 (melanoma growth stimulating activity, | 623 | 3.0110 |
| | alpha) W42723 | | |

B. Genes Downregulated at Least Eight Fold by Treatment with hIL-1β Treatment

| | | | |
|---|---|---|---|
| CGEN_HUM_1013169_1 | FLJ12800 Hypothetical protein FLJ12800 AK023691 | 624 | −3.0000 |
| CGEN_HUM_1018287_1 | NAPE-PLD N-acyl-phosphatidylethanolamine-hydrolyzing phospholipase D | 625 | −3.0050 |
| | AK000801 | | |
| CGEN_HUM_1006696_1 | SERPINH1 Serine (or cysteine) proteinase inhibitor, clade H (heat shock protein 47), | 626 | −3.0620 |
| | member 1, (collagen binding protein 1) NM_001235 | | |
| CGEN_HUM_1017475_1 | MGC3200 Hypothetical protein LOC284615 AL359622 | 627 | −3.0690 |
| CGEN_HUM_1018837_1 | RAPH1 Ras association (RaIGDS/AF-6) and pleckstrin homology domains 1 | 628 | −3.0700 |
| | AF086189 | | |
| CPEROU_OLIGO_197_0 | Transcribed locus AA056377 | 629 | −3.0770 |
| CGEN_HUM_1000972_1 | COH1 Cohen syndrome 1 NM_017890 | 630 | −3.0870 |
| CPEROU_OLIGO_155_0 | Full-length cDNA clone CS0CAP002YO01 of Thymus of Homo sapiens (human) | 631 | −3.0880 |
| | W87826 | | |
| CGEN_HUM_1009060_1 | RASAL2 RAS protein activator like 2 NM_004841 | 632 | −3.1120 |
| CGEN_HUM_1002744_1 | CTBP2 C-terminal binding protein 2 NM_001329 | 633 | −3.1140 |
| CGEN_HUM_1005622_1 | ARF3 ADP-ribosylation factor 3 NM_001659 | 634 | −3.1200 |
| CGEN_HUM_1006998_1 | MNS1 Meiosis-specific nuclear structural protein 1 NM_018365 | 635 | −3.1210 |
| CGEN_HUM_1007685_1 | FLJ10385 Hypothetical protein FLJ10385 U58658 | 636 | −3.1370 |
| CGEN_HUM_1007662_1 | HRASLS HRAS-like suppressor NM_020386 | 637 | −3.1410 |
| CGEN_HUM_1006557_1 | PAX5 Paired box gene 5 (B-cell lineage specific activator) NM_016734 | 638 | −3.1800 |
| CGEN_HUM_1016508_1 | cDNA: FLJ22769 fis, clone KAIA1316 AK026422 | 639 | −3.1840 |
| CGEN_HUM_1016177_1 | PTGDR Prostaglandin D2 receptor (DP) AK026202 | 640 | −3.1870 |
| CGEN_HUM_1015660_1 | cDNA FLJ11479 fis, clone HEMBA1001784 AK021541 | 641 | −3.1920 |
| CGEN_HUM_1001684_1 | ZNF205 Zinc finger protein 205 NM_003456 | 642 | −3.2060 |
| CGEN_HUM_1014309_1 | FLJ11151 Hypothetical protein FLJ11151 NM_018340 | 643 | −3.2080 |
| CGEN_HUM_1008916_1 | CNOT7 CCR4-NOT transcription complex, subunit 7 NM_013354 | 644 | −3.2130 |
| CGEN_HUM_1014020_1 | cDNA FLJ13605 fis, clone PLACE1010562 AK023667 | 645 | −3.2190 |
| CGEN_HUM_1003408_1 | PTPRN Protein tyrosine phosphatase, receptor type, N NM_002846 | 646 | −3.2230 |
| CGEN_HUM_1007205_1 | TUBD1 Tubulin, delta 1 NM_016261 | 647 | −3.2280 |
| CGEN_HUM_1012948_1 | CTNND2 Catenin (cadherin-associated protein), delta 2 (neural plakophilin-related | 648 | −3.2310 |
| | arm-repeat protein) AF056423 | | |
| CGEN_HUM_1017096_1 | G6PD Glucose-6-phosphate dehydrogenase M19866 | 649 | −3.2370 |
| CGEN_HUM_1018146_1 | LOC90110 Hypothetical protein LOC90110 AL117623 | 650 | −3.2720 |
| CGEN_HUM_1014942_1 | EIF5B Eukaryotic translation initiation factor 5B AK025799 | 651 | −3.2810 |
| CGEN_HUM_1013908_1 | GENBANK ® Accession No. U61100 | 652 | −3.2880 |
| CGEN_HUM_1005267_1 | SLC30A4 Solute carrier family 30 (zinc transporter), member 4 NM_013309 | 653 | −3.2940 |
| CGEN_HUM_1006072_1 | FPRL1 Formyl peptide receptor-like 1 NM_001462 | 654 | −3.3020 |
| CGEN_HUM_1013068_1 | LOC201158 Similar to CGI-148 protein AK022250 | 655 | −3.3160 |
| CGEN_HUM_1013140_1 | OR2F1 olfactory receptor, family 2, subfamily F, member 1 NM_012369 | 656 | −3.3320 |
| CGEN_HUM_1011543_1 | MYO9A Myosin IXA NM_006901 | 657 | −3.3530 |
| CGEN_HUM_1017078_1 | HUMCFMS01 transmembrane glycoprotein (c-fms) gene, exon 1, and platelet- | 658 | −3.3580 |
| | derived growth factor receptor (PDGF) gene, 3′UTR M25785 | | |
| CGEN_HUM_1014604_1 | MLSTD2 Male sterility domain containing 2 AK024967 | 659 | −3.3860 |
| CGEN_HUM_1015769_1 | cDNA FLJ12239 fis, clone MAMMA1001268 AK022301 | 660 | −3.3930 |
| CGEN_HUM_1005734_1 | RAB19B GTP-binding protein RAB19B AF091033 | 661 | −3.4080 |
| CGEN_HUM_1002596_1 | PRPF3 PRP3 pre-mRNA processing factor 3 homolog (yeast) NM_004698 | 662 | −3.4320 |
| CGEN_HUM_1014273_1 | P53AIP1 P53-regulated apoptosis-inducing protein 1 AB045832 | 663 | −3.4760 |
| CGEN_HUM_1016941_1 | QC2 QC2 geneX69081 | 664 | −3.4840 |
| CGEN_HUM_1017835_1 | TMEM35 Transmembrane protein 35 AK024146 | 665 | −3.4950 |
| CGEN_HUM_1017654_1 | GTCD1 glycosyltransferase-like domain containing 1, transcript variant 2 | 666 | −3.5010 |
| | NM_014118; NM_024659 | | |
| CGEN_HUM_1014548_1 | clone HEB4 Cri-du-chat region mRNA AF009287 | 667 | −3.5540 |
| CGEN_HUM_1006275_1 | MAP3K5 Mitogen-activated protein kinase kinase kinase 5 NM_005923 | 668 | −3.6390 |
| CGEN_HUM_1005939_1 | NUP155 Nucleoporin 155 kDa NM_004298 | 669 | −3.6390 |
| CGEN_HUM_1010762_1 | SCML2 Sex comb on midleg-like 2 (Drosophila) NM_006089 | 670 | −3.6500 |
| CGEN_HUM_1001704_1 | EVX1 Eve, even-skipped homeo box homolog 1 (Drosophila) NM_001989 | 671 | −3.6580 |
| CGEN_HUM_1009575_1 | EPHA6 EPH receptor A6 AL133666 | 672 | −3.6630 |
| CGEN_HUM_1003918_1 | MEP1B Meprin A, beta NM_005925 | 673 | −3.6670 |
| CGEN_HUM_1014069_1 | Clone IMAGE: 111510 mRNA sequence AF143870 | 674 | −3.6840 |
| CGEN_HUM_1012275_1 | Full length insert cDNA clone YB63G06 AF147362 | 675 | −3.6950 |
| CGEN_HUM_1004163_1 | MGC3123 Hypothetical protein MGC3123 AY007092 | 676 | −3.6980 |
| CGEN_HUM_1018482_1 | Full length insert cDNA clone ZD88D12 AF086474 | 677 | −3.7020 |
| CGEN_HUM_1017224_1 | C10orf18 Chromosome 10 open reading frame 18 AL049233 | 678 | −3.7480 |
| CGEN_HUM_1005136_1 | SAC Testicular soluble adenylyl cyclase NM_018417 | 679 | −3.7480 |
| CGEN_HUM_1013865_1 | cDNA clone IMAGE: 5278284, mRNA AK024371 | 680 | −3.7520 |
| CGEN_HUM_1009665_1 | KIAA1467 Serotonin-7 receptor pseudogene U86813 | 681 | −3.7890 |
| CGEN_HUM_1010847_1 | SALL2 Sal-like 2 (Drosophila) X98834 | 682 | −3.8340 |
| CGEN_HUM_1017708_1 | FMNL2 Formin-like 2 AL390143 | 683 | −3.8610 |
| CGEN_HUM_1005022_1 | ABCA12 ATP-binding cassette, sub-family A (ABC1), member 12 AL080207 | 684 | −3.8640 |
| CGEN_HUM_1010038_1 | NPY Neuropeptide Y NM_000905 | 685 | −3.9050 |
| CPEROU_OLIGO_37_0 | IL20 Interleukin 20 NM_018724 | 686 | −3.9280 |
| CGEN_HUM_1013103_1 | IL1RAPL1 Interleukin 1 receptor accessory protein-like 1 AL157478 | 687 | −3.9690 |
| CGEN_HUM_1012359_1 | LCHN LCHN protein AF116707 | 688 | −3.9700 |
| CGEN_HUM_1000029_1 | RHOH Ras homolog gene family, member H NM_004310 | 689 | −3.9710 |
| CGEN_HUM_1009159_1 | TNFRSF18 Tumor necrosis factor receptor superfamily, member 18 NM_004195 | 690 | −3.9960 |
| CGEN_HUM_1005100_1 | C16orf3 Chromosome 16 open reading frame 3 NM_001214 | 691 | −4.0860 |
| CGEN_HUM_1007404_1 | FGF5 Fibroblast growth factor 5 NM_004464 | 692 | −4.1240 |
| CGEN_HUM_1018152_1 | PLCXD2 Phosphatidylinositol-specific phospholipase C, X domain containing 2 | 693 | −4.1240 |
| | AF143877 | | |
| CGEN_HUM_1002550_1 | RBMY2FP RNA binding motif protein, Y-linked, family 2, member F pseudogene | 694 | −4.1690 |
| | U94387 | | |
| CGEN_HUM_1008501_1 | CHRDL2 Chordin-like 2 AL110168 | 695 | −4.1940 |
| CGEN_HUM_1014739_1 | HRMT1L1 HMT1 hnRNP methyltransferase-like 1 (S. cerevisiae) AL050065 | 696 | −4.1970 |
| CGEN_HUM_1007487_1 | NAG Neuroblastoma-amplified protein NM_015909 | 697 | −4.2130 |
| CGEN_HUM_1013840_1 | GENBANK ® Accession No. NM_018635 | 698 | −4.2170 |
| CGEN_HUM_1018020_1 | PARVB Parvin, beta AF147358 | 699 | −4.2230 |
| CGEN_HUM_1009154_1 | GNRH2 Gonadotropin-releasing hormone 2 NM_001501 | 700 | −4.2560 |
| CGEN_HUM_1012300_1 | SEL1L Sel-1 suppressor of lin-12-like (C. elegans) AK022015 | 701 | −4.2760 |
| CGEN_HUM_1008102_1 | KIF2C Kinesin family member 2C NM_006845 | 702 | −4.2960 |
| CGEN_HUM_1004037_1 | UBQLN3 Ubiquilin 3 NM_017481 | 703 | −4.3240 |
| CGEN_HUM_1010980_1 | GENBANK ® Accession No. NM_017973 | 704 | −4.3380 |
| CGEN_HUM_1016527_1 | cDNA clone YR22D05 AF085916 | 705 | −4.4100 |
| CGEN_HUM_1013092_1 | KLK12 Kallikrein 12 NM_019598 | 706 | −4.4890 |
| CGEN_HUM_1010428_1 | DHX34 DEAH box polypeptide 34 NM_014681 | 707 | −4.5320 |
| CGEN_HUM_1018667_1 | SYT9 Synaptotagmin IX AL137512 | 708 | −4.5470 |
| CGEN_HUM_1010012_1 | CCR6 Chemokine (C-C motif) receptor 6 NM_004367 | 709 | −4.6040 |
| CGEN_HUM_1018044_1 | EST from clone 76558, 5′ end AL110290 | 710 | −4.6380 |
| CGEN_HUM_1005434_1 | RYR1 Ryanodine receptor 1 (skeletal) J05200 | 711 | −4.7160 |
| CGEN_HUM_1016063_1 | RAB38 RAB38, member RAS oncogene family AK026725 | 712 | −4.7420 |
| CGEN_HUM_1014304_1 | SBF2 SET binding factor 2 U80769 | 713 | −4.7490 |
| CGEN_HUM_1010210_1 | SIRPB2 Signal-regulatory protein beta 2 NM_018556 | 714 | −4.7720 |
| CGEN_HUM_1005628_1 | RAB20 RAB20, member RAS oncogene family NM_017817 | 715 | −4.8360 |
| CGEN_HUM_1012516_1 | FLJ10786 Hypothetical protein FLJ10786 NM_018219 | 716 | −4.8700 |
| CGEN_HUM_1009809_1 | LOC55971 Insulin receptor tyrosine kinase substrate NM_018842 | 717 | −4.9950 |
| CGEN_HUM_1011590_1 | OR2L1P Olfactory receptor, family 2, subfamily L, member 1 pseudogene X64980 | 718 | −5.0820 |
| CGEN_HUM_1013476_1 | cDNA DKFZp434D1516 (from clone DKFZp434D1516) AL137284 | 719 | −5.1540 |
| CGEN_HUM_1013511_1 | GPR8 G protein-coupled receptor 8 NM_005286 | 720 | −5.3030 |
| CGEN_HUM_1012346_1 | PRO1048 hypothetical protein PRO1048 NM_018497 | 721 | −5.3920 |
| CGEN_HUM_1018788_1 | CALN1 Calneuron 1 AF070549 | 722 | −5.5170 |
| CGEN_HUM_1014948_1 | SGOL1 Shugoshin-like 1 (S. pombe) AK024292 | 723 | −6.2870 |
| CGEN_HUM_1014954_1 | cDNA DKFZp566P1546 (from clone DKFZp566P1546) AL050085 | 724 | −6.9370 |

^{a}The data presented in the column entitled “+1L-1β vs. Control” are presented in the form of a fold increase in IL-1β-treated cells versus control cells (i.e., no IL-1β treatment). The values are expressed as the log₂[fold increase] as before. In Table 4B, the means have negative values to indicate that these genes are downregulated by IL-1β treatment.
^{b}The descriptions that appear in the column headed by “NAME” include one or more of a gene name, a gene description, and one or more database accession numbers. All accession numbers are for the GENBANK ® database unless otherwise indicated.

### Example 5

### Gene Expression Analysis of Achilles Tendon Versus Other Tendons

[0214] Achilles tendon, flexor tendon, and tail tendon tissues were collected wild type mice and RNA was isolated and reverse transcribed as described above in General Materials and Methods. Mouse Achilles tendon (AT) RNAs were reverse transcribed into cDNAs labeled with Cyanine 3 (a green dye fluorophore; Cy3) while flexor tendon or tial tendon RNAs were labeled with cyanine 5 (a red dye fluorophore; Cy5). cDNAs from AT, flexor tendon, or tail tendon were pooled in equal proportions then hybridized with arrayed DNA sequences using the Agilent chip, with AT being compared to flexor tendon in one experiment, and with tail tendon in another. Hybridized arrays were then imaged and fluorescence quantitation was made for each dye and each spot.

[0215] Genes that were expressed at an at least 2 fold higher level in AT versus flexor tendon included loricrin (Lor; GENBANK®Accession No. NM_{—}0085087), keratin complex 2, basic, gene 17 (Krt-17; GENBANK® Accession No. NM_{—}010668), small prolinerich-like 3 (Sprrl3; GENBANK® Accession No. NM_{—}025984), keratin complex 1, acidic, gene 10 (Krt1-10; GENBANK® Accession No. NM_{—}010660), lymphocyte antigen 6 complex, locus D (Ly6d; GENBANK® Accession No. NM_{—}010742), filaggrin (Flg; GENBANK® Accession No. AF510860), RIKEN cDNA2200001115 gene (2200001I15 Rik; GENBANK® Accession No. NM_{—}026394), myosin, heavy polypeptide 6, cardiac muscle, alpha (Myh6; GENBANK® Accession No. NM_{—}010856), similar to keratinocyteprolin-rich protein (AA589586; GENBANK® Accession No. AK003253), and adipsin (And; GENBANK® Accession No. NM_{—}013459). Genes that were expressed at an at least 2 fold higher level in AT versus tail tendon included filaggrin (Flg; GENBANK® Accession No. AF510860), loricrin (Lor; GENBANK® Accession No. NM_{—}0085087), calmodulin 4 (Calm4; GENBANK® Accession No. NM_{—}020036); hornerin (GENBANK® Accession No. AY027660), similar to keratinocytesproline-rich protein (LOC433619; GENBANK® Accession Nos. XM_{—}904796 and XM_{—}485267), lymphocyte antigen 6 complex, locus D (Ly6D: GENBANK® Accession No. NM_{—}010742), paired like homeodomain transcription factor 1 (Pitxl; GENBANK® Accession No. NM_{—}011097), keratin complex 1, acidic, gene 10 (Krt1-10; GENBANK® Accession No. NM_{—}010660), small prolinerich-like 2 (Sprrl2; GENBANK® Accession No. NM_{—}028625), small prolinerich-like 10 (Sprrl10; GENBANK® Accession No. AK004318), small prolinerich-like 7 (Sprrl7; GENBANK® Accession No. NM_{—}027137), and serine protease inhibitor, Kazal type 5 (Spink5; GENBANK® Accession No. XM_{—}283487).

### Discussion of Examples 1-5

[0216] Disclosed herein are the first results of gene array experiments revealing comparisons of differential gene expression in tendon versus a nearest neighbor tissue (muscle), to a treatment with a cytokine thought to be involved in tendon pathology (IL-1β), and to tendon cells in different genetic environments (P2Y₂ knockout and P2Y₁/P2Y₂ double knockout mice). Inspection of the entire gene list for lower fold changes in expression show other candidate genes such as tenomodulin, thought to be a marker for tendon, and titin, thought to be a marker for muscle, that were expressed to an even greater degree in tendon.

### REFERENCES

[0217] The references listed below as well as all references cited in the specification, including patents, patent applications, journal articles, and all database entries (e.g., GENBANK®, TIGR, ENSEMBL, and Agilent Accession numbers, including any annotations presented in the databases associated with the disclosed sequences), are incorporated herein by reference to the extent that they supplement, explain, provide a background for, or teach methodology, techniques, and/or compositions employed herein.
[0218] Alam et al. 1990 188 Anal Biochem 245-254.
[0219] Albert et al. (1992) J Virol 66:5627-5630.
[0220] Alexay et al. (1996) The International Society of Optical Engineering 2705/63.
[0221] Altschul (1993) 36 J Mol Evol 290-300.
[0222] Altschul et al. (1990) 215 J Mol Biol 403-410.
[0223] Altschul et al. (1994) 6 Nature Genet 119-129.
[0224] Ausubel et al. (2002) Short Protocols in Molecular Biology, Fifth ed. Wiley, New York, N.Y., United States of America.
[0225] Ausubel et al. (2003) Current Protocols in Molecular Biology, John Wylie & Sons, Inc., New York, N.Y., United States of America.
[0226] Batzer et al. (1991) 19 Nucleic Acid Res 5081.
[0227] Bej et al. (1991) Appl Environ Microbiol 57:3529-3534.
[0228] Boom et al. (1990) J Clin Microbiol 28:495-503.
[0229] Buffone et al. (1991) Clin Chem 37:1945-1949.
[0230] Busch et al. (1992) Transfusion 32:420-425.
[0231] Cha & Thilly (1993) PCR Methods Appl 3:S18-S29.
[0232] Chiodi et al. (1992) J Clin Microbiol 30:255-258.
[0233] Cressman et al. (1999) 274 J Biol Chem 26461-26468.
[0234] DeRisi et al. (1996) Nat Genet 14:457-460.
[0235] Dubiley et al. (1997) Nuc Acids Res 25:2259-2265.
[0236] Englert (2000) in Schena, ed., Microarray Biochip Technology, pp. 231-246, Eaton Publishing, Natick, Mass., United States of America.
[0237] Fodor et al. (1991) Science 251:767-773.
[0238] Fodor et al. (1993) Nature 364:555-556.
[0239] Grant 1995 in Molecular Biology and Biotechnology, Meyers (ed.) VCH Publishers, New York, N.Y., United States of America.
[0240] Guedon et al. (2000) Anal Chem 72(24):6003-6009.
[0241] Hamel et al. (1995) J Clin Microbiol 33:287-291.
[0242] Heaton et al. (2001) Proc Natl Acad Sci USA 98(7):3701-3704.
[0243] Henikoff & Henikoff (1992) 89 Proc Natl Acad Sci USA 10915-10919.
[0244] Hermanson (1990) Bioconjugate Techniques, Academic Press, San Diego, Calif., United States of America.
[0245] Herrewegh et al. (1995) J Clin Microbiol 33:684-689.
[0246] Izraeli et al. (1991) Nuc Acids Res 19:6051.
[0247] Karlin & Altschul (1993) 90 Proc Natl Acad Sci USA 5873-5877.
[0248] Karlin et al. (1990) 87 Proc Natl Acad Sci USA 2264-2268.
[0249] Kohsaka & Carson (1994) J Clin Lab Anal 8:425-455.
[0250] Lanciotti et al. (1992) J Clin Microbiol 30:545-551.
[0251] Leon et al., (1999) 104 J Clin Invest 1731-1737.
[0252] Linz et al. (1990) J Clin Chem Clin Biochem 28:5-13.
[0253] Lisle et al. (2001) BioTechniques 30:1268-1272.
[0254] Liu & Hlady (1996) Coll Sur B 8:25-37.
[0255] Lockhart et al. (1996) 14 Nat Biotechnol 1675-1680.
[0256] Mace et al. (2000) in Schena, ed., Microarray Biochip Technology, pp. 39-64, Eaton Publishing, Natick, Mass., United States of America.
[0257] Maier et al. (1994) J Biotechnol 35:191-203.
[0258] McCaustland et al. (1991) J Virol Methods 35:331-342.
[0259] McGall et al. (1996) 93 Proc Nat Acad Sci USA 13555-13460.
[0260] McPherson et al. (1995) PCR 2: A Practical Approach, IRL Press, New York, N.Y., United States of America.
[0261] Millar et al., (1995) Anal Biochem 226:325-330.
[0262] Natarajan et al. (1994) PCR Methods Appl 3:346-350.
[0263] Needleman & Wunsch (1970) 48 J Mol Biol 443-453.
[0264] Nelson et al. (2001) Anal Chem 73(1):1-7.
[0265] O'Donnell et al. (1997) Anal Chem 69:2438-2443.
[0266] Ohtsuka et al. (1985) 260 J Biol Chem 2605-2608.
[0267] Paladichuk (1999) The Scientist 13(16):20-23.
[0268] PCT International Patent Application Publications WO 93/09668; WO 95/11755; WO 97/14028; WO 99/19515; WO 99/32660; WO 99/63385; WO 01/13120; WO 01/14589; WO 01/23082.
[0269] Pearson & Lipman (1988) 85 Proc Natl Acad Sci USA 2444-2448.
[0270] Piétu et al. (1996) Genome Res 6:492-503.
[0271] Randolph & Waggoner (1995) Nuc Acids Res 25:2923-2929.
[0272] Ratner & Castner (1997) in Vickerman, ed., Surface Analysis: The Principal Techniques, John Wiley & Sons, New York, United States of America.
[0273] Robertson & Walsh-Weller (1998) Methods Mol Biol 98:121-154.
[0274] Rose (2000) in Schena, ed., Microarray Biochip Technology, pp. 19-38, Eaton Publishing, Natick, Mass., United States of America.
[0275] Rossolini et al. (1994) 8 Mol Cell Probes 91-98.
[0276] Roux (1995) PCR Methods Appl 4:S185-S194.
[0277] Rupp et al. (1988) BioTechniques 6:56-60.
[0278] Sambrook & Russell (2001) Molecular Cloning: A Laboratory Manual, Cold Spring Harbor Press, Cold Spring Harbor, N.Y.
[0279] Sapolsky & Lipshutz (1996) Genomics 33:445-456.
[0280] Schena (2000) Microarray Biochip Technology. Eaton Publishing, Natick, Mass., United States of America.
[0281] Schena et al. (1995) Science 270:467-470.
[0282] Schena et al. (1996) Proc Natl Acad Sci USA 93:10614-10619.
[0283] Shalon et al. (1996) Genome Res 6:639-645.
[0284] Shoemaker et al. (1996) Nat Genet 14:450-456.
[0285] Shriver-Lake (1998) in Cass & Ligler, eds., Immobilized Biomolecules in Analysis, pp. 1-14, Oxford Press, Oxford, United Kingdom.
[0286] Silhavy et al. (1984) Experiments with Gene Fusions, Cold Spring Harbor Laboratory, Cold Spring Harbor, N.Y., United States of America.
[0287] Smith (1998) The Scientist 12(14):21-24.
[0288] Smith & Waterman (1981) 2 Adv Appl Math 482-489.
[0289] Smith et al. (1998) Clin Chem 44(9):2054-2056.
[0290] Southern (1975) J Mol Biol 98:503-517.
[0291] Strain & Chmielewski (2001) BioTechniques 30(6):1286-1291.
[0292] Steel et al. (2000) in Schena, ed., Microarray Biochip Technology, pp. 87-118, Eaton Publishing, Natick, Mass., United States of America.
[0293] Tanaka et al. (1994) J Gen Virol 75:2691-2698.
[0294] Telenius et al. (1992) Genomics 13:718-725.
[0295] Theriault et al. (1999) in Schena, ed., DNA Microarrays: A Practical Approach, pp. 101-120, Oxford University Press Inc., New York, N.Y., United States of America.
[0296] Tijssen (ed.) (1993) Laboratory Techniques in Biochemistry and Molecular Biology: Hybridization With Nucleic Acid Probes, Part I Theory and Nucleic Acid Preparation, Elsevier Press, New York, N.Y., United States of America.
[0297] U.S. Pat. Nos. 4,729,947; 5,143,854; 5,207,880; 5,230,781; 5,346,603; 5,360,523; 5,445,934; 5,534,125; 5,571,388; 5,743,960; 5,800,992; 5,837,832; 5,843,767; 5,846,717; 5,871,918; 5,916,524; 5,965,352; 5,968,745; 5,974,164; 5,985,557; 5,994,069; 6,001,567; 6,017,696; 6,066,457, 6,086,737; 6,090,543; 6,123,819; 6,127,127; 6,162,603; 6,185,561; 6,225,059; 6,229,911; 6,245,508.
[0298] Vankerckhoven et al. (1994) J Clin Microbiol 30:750-753.
[0299] Vignali (2000) J Immunol Methods 243(1-2):243-255.
[0300] Wang et al. (1998) Proc Natl Acad Sci USA 86:9717-9721.
[0301] Warrington et al. (2000) in Schena, ed., Microarray Biochip Technology, pp. 119-148, Eaton Publishing, Natick, Mass., United States of America.
[0302] Williams (1989) BioTechniques 7:762-769.
[0303] Williams et al. (1990) Nuc Acids Res 18(22):6531-6535.
[0304] Worley et al. (2000) in Schena, ed., Microarray Biochip Technology, pp. 65-86, Eaton Publishing, Natick, Mass., United States of America.
[0305] Yang et al. (1998) Science 282:2244-2246.
[0306] Yershov et al. (1996) Proc Natl Acad Sci USA 93:4319-4918.

[0307] It will be understood that various details of the presently disclosed subject matter can be changed without departing from the scope of the presently disclosed subject matter. Furthermore, the foregoing description is for the purpose of illustration only, and not for the purpose of limitation.

What is claimed is:

1. A method for detecting connective tissue-specific gene expression in a sample, the method comprising detecting a level of expression in a sample of at least one gene for which expression is connective tissue-specific.

2. The method of claim 1, wherein the connective tissue is selected from the group consisting of muscle and tendon.

3. The method of claim 2, wherein the connective tissue is tendon.

4. The method of claim 1, wherein the at least one gene is selected from the group consisting of those genes listed in Tables 1-4.

5. The method of claim 1, wherein the detecting comprising hybridizing a nucleic acid isolated from the sample to an array comprising the at least one gene.

6. A method for diagnosing a disease of or an injury to a connective tissue in a mammalian subject, the method comprising detecting a level of expression in a biological sample of at least one gene for which an expression level is indicative of disease or injury in a connective tissue.

7. The method of claim 6, wherein the connective tissue is selected from the group consisting of muscle and tendon.

8. The method of claim 7, wherein the connective tissue is tendon.

9. The method of claim 6, wherein the at least one gene is selected from the group consisting of those genes listed in Tables 1-4.

10. The method of claim 9, wherein differential expression of at least one of the genes listed in Tables 1-4 is indicative of a disease or injury to a tendon.

11. The method of claim 6, wherein the detecting comprising hybridizing a nucleic acid isolated from a sample isolated from the mammalian subject to an array comprising the at least one gene.

12. A method for detecting the progression of a disease of or an injury to a connective tissue in a mammalian subject, the method comprising detecting a level of expression in a biological sample of at least one gene for which an expression level is indicative of progression of a disease or injury in a connective tissue.

13. The method of claim 12, wherein the connective tissue is selected from the group consisting of muscle and tendon.

14. The method of claim 13, wherein the connective tissue is tendon.

15. The method of claim 12, wherein the at least one gene is selected from the group consisting of those genes listed in Tables 1-4.

16. The method of claim 15, wherein differential expression of at least one of the genes listed in Tables 1-4 is indicative of progression of a disease of or an injury to a tendon.

17. The method of claim 12, wherein the detecting comprising hybridizing a nucleic acid isolated from a sample isolated from the mammalian subject to an array comprising the at least one gene.

18. A method for monitoring the treatment of a mammalian subject with a disease of or an injury to a connective tissue, the method comprising:
a) providing a treatment to the subject;
b) detecting a level of expression of at least one gene from a cell or biological sample from the subject; and
c) comparing the level of expression detected in step (b) to a level of expression from a cell population comprising normal connective tissue cells, to a level of expression from a cell population comprising diseased or injured connective tissue, or both.

19. The method of claim 18, wherein the connective tissue is selected from the group consisting of muscle and tendon.

20. The method of claim 19, wherein the connective tissue is tendon.

21. The method of claim 18, wherein the at least one gene is selected from the group consisting of those genes listed in Tables 1-4.

22. The method of claim 21, wherein differential expression of at least one of the genes listed in Tables 1-4 is indicative of an effect of the treatment provided on a disease of or an injury to a tendon.

23. The method of claim 18, wherein the detecting comprising hybridizing a nucleic acid isolated from a sample isolated from the mammalian subject to an array comprising the at least one gene.

24. A kit for detecting expression of a gene differentially expressed in a connective tissue, the kit comprising a plurality of reagents that can be used to detect expression levels for at least one gene for which expression is connective tissue-specific.

25. The kit of claim 24, wherein the at least one gene is selected from the group consisting of those genes listed in Tables 1-4.

26. The kit of claim 24, wherein the plurality of reagents comprise at least one oligonucleotide pair that can be used to specifically amplify the at least one gene for which expression is connective tissue-specific.

27. The kit of claim 26, wherein the at least one gene is selected from the group consisting of those genes listed in Tables 1-4.

28. The kit of claim 24, further comprising one or more solid supports comprising one or more oligonucleotides attached thereto that specifically bind to at least one of the genes listed in Tables 1-4.

29. The kit of claim 28, wherein the one or more solid supports comprise an array, a microarray, or combinations thereof.

The application's sequence listing, which the Patent Office published only in electronic form, follows.

SEQUENCE LISTING (724 sequences)

SEQ ID NO: 1 - DNA, 1114 bp, Mus musculus
gattcggcatgaggccaaatcctggggttttgggccctcggtaccgtttgcgcacgaaggggcgtgtgcgacggacccaggccagggagccagaactattcgctgctcgcaggagcgcacgctgtcgccaaggtcgggtcaagtcgtcgcggggcgtggctgatagggcagtgatttaagagacgcggctttgggacaggaggacccgcaccaatggagaccgccagggactacgcgggagccctcatcaggcccctgacattcatgggattgcagactaagaaggtcctactgacccccctcatacatccagctcgcccttttcgagtttcaaaccatgaccgaagtagccggcgtggggtgatggccagcagcctgcaggaacttatcagcaagactctggatgtcttagtcatcacaactggcctggttacgctggtgctggaggaggacggcaccgtggtggacacagaggagttctttcagaccttaagggacaacacgcatttcatgatcttggaaaagggacagaaatggacaccgggtagtaagtatgtcccagtctgcaagcaaccaaagaaatcgggaatagccagagtcaccttcgacctatacaggctgaaccccaaggacttcctcggctgtctcaatgtcaaagccacgatgtacgagatgtactcggtgtcctacgacatccgatgcaccaggttcaaggccgtgttaaggaatctgctgaggtttatgtcctatgctgcacagatgacgggacagttcctggtctatgcgggcacatacatgctccgagtactgggcgatacagaagagcagccatcccccaagcctagcaccaaaggctggttcatgtaaccagggcacagctacagaggcccagggaccctgctctctgttataggctgtgggatgccaggggaaggaatgggggtggtacccagtgcagggctgagtagcaggattcctgcaaaggaaaggcggcagaggggcctttcaagcgctttaggaagggatcaacagcggagtgtgtgggaactgcgtggatacgaatcagtttctttggatccttacatactgtaataaaccagtcacatgagtcgtc

SEQ ID NO: 2 - DNA, 1051 bp, Mus musculus
agcaaccatgcaagtgctaacgaaacgctatcccaagaactgcctgctgacagtcatggatcggtactccgcggtggtgcggaacatggagcaggtggtgatgatccccagccttctgagggatgtgcagctgagtgggcctgggggctcggtccaggacggagcccctgatctctatacctacttcaccatgctcaagagcatctgtgtagaagtggaccacgggctgctgccaagggaggaatggcaggccaaggtggctggcaacgaaaccagcgaggctgagaacgacgctgctgaaacggaggaggccgaagaagacaggatctcggaggagctggacctagaagcccagttccacctgcacttctgcagcctccatcacatccttacccacctgacccggaaagcacaggaggtgacgcggaaataccaggaaatgacagggcaggtcctgtaggtctttgactcttctgaagatcgctttacacgagagaagactgatgaagaccccgaggtgcatcaacccgagacctggacagagggcctggccccaggtggacgcgaaggcggcttccgtctccctctgagtgcatctgtggacttggttgcaggctcacctttaagatatttgtgtgactcccaacttctcttccgtatcttagcagtttgaggttcacgaggcagcaaggatcagtaggaagcacaggtattaacaagttggccaaagttcacgtcccacctctgggatgtcgtttagtgcctggtgtcatgtcgcagttactctttcatgtataaagcagggatgctgtatctacctcacacggttactaaaagcaaacacggaatccaaagccctgggcacatgccgacatctgaaaagctggtgtttctcccacctccctccgagtgcatgctgtacgcagctcttgcttttatccctggggaaaggctgaggtcactgagtgtgtgggatgagctgctcaggctgctgggcctgatgcgctgagcacatgaacctaactattgtagtagcaaaaaaaaaaaaaaa

SEQ ID NO: 3 - DNA, 2104 bp, Mus musculus
agccgttaaggtggccgcccacaagctctatgagtcactgggcttcagacacatgggcgcgagtgatcactacgtgctgcctggcatgaccctctcgctggccgagcgcctcttcttccaggtccgctaccaccgctaccgcctgcagctgcgcgaggagtgaccaccaccacctgcccaccaccctgtctgcccccgtccacctctgccctcttgctcactgcctagtgcggccctgctttccaatgctcaccttggcatttgtttgggttttcctttttcagcatcatgctggttcatcacctggctggttctggggccacagggtcccagtccagagtgctcatctgcaacactctggtggggtggattgtctgcagccatggcccttgcctccccagcccatcagagtggctcatcatgccttgaagagcagcattgtggaccatctgaactatccacaaagctgcccagcctgcctccatcagggaaggactagccttgcccatcaagcacagaacctctacaacaacccccccccccccaaggagcagaaccctggcccccagccaggctaaggctcaactattggcctctggaagagtggtctgctgggctggccagccactgccccatgggaggctgagctggtcccaggccctgctttgccctgtgcatgctaaggacatggcctggctgcagcatgccgcatgccacagccccctgccccactatcctgcccagcctggacctcaggcctgagctggtgagctcccttgtcctgtcctgagctggcctctggagggcctacctgcctgaccctgtctactctctggtgaggcctggcctggcctaacctggctctatccactcctgctttgcttcgaaatcatcttacctctttccctttttggtccccgtgcctccttgctctggctgacttggctggtcacccgggtttggttcctgtagcaatccactgcacagcatggtggggatttcatgggggtgggggggacacctcccccaacacctgttagaccaggtggccacctcccagctgcctgaggtcctgtggcctcatgctgtttgtggggtctgccctgtgaatgtaactagcccaggctgttgttggcaatgcctgccacagcttctcccagcctgaaacaacccattctctaataagttacgtagacagaatagcactctgcatgactttaattactgggacaaaatggtagtttgagcctccagacacacatctgtgtggtgctagcatacgcatggtctctggccccatttgatgggggtgggtggccgggtaggtggaagatttcagtttgaagtatggaaggagactctaatttagtgtaaacacccctaaagtgccctcacaacacagtctgtgaggctcaggttgccccttgattccttgtatgcaggattgaggggactggagggtcctaaagcctcataggaagggctgggcactgcctcgggggaagaagctggtggttggggtgggtccaggtatcacccactacagactactctgctaggtcaactgttcctggcctctcctttttgaggttctacttcagatccagcctagatgggggtgggtatggcctaggacagggaaaggcagtagctggcagtggtcatgaggccagctgaaacttggacttagctttagtgcagggggtgcataaaggcccgtccacattcctctgtgtggggcttggggtgaggagtggcaggctaggtagaccatagagctgggcccctggcaccaaggctacattattagaaaggctctttagagttaatgagttggtggaacaagcccagcttcctgaggggccttttgtcctgttagcaattgaggcatttgcagaacactgtacagaccccgctctcccctgtacattcctccctggtggtgcccggtccccgcttggggatgggagttttgtagactgtacagaaattggcaccctattttcttgcagctctcagattttgttaatctggattatacagacagatgtaaagtgttttagcaaaatggaaaaaaaaaaaaaaaaaaaaaaaaaaaaaaaaa

SEQ ID NO: 4 - DNA, 630 bp, Mus musculus
gtttacgtttgcttctgattctgttgtgttgacttgcaacctcagaaacagacatcatggtgcacctgactgatgctgagaaggctgctgtctctggcctgtggggaaaggtgaacgccgatgaagttggtggtgaggccctgggcaggctgctggttgtctacccttggacccagcggtactttgatagctttggagacctatcctctgcctctgctatcatgggtaatgccaaagtgaaggcccatggcaagaaagtgataactgcctttaacgatggcctgaatcacttggacagcctcaagggcacctttgccagcctcagtgagctccactgtgacaagctgcatgtggatcctgagaacttcaggctcctgggcaatatgatcgtgattgtgctgggccaccacctgggcaaggatttcacccccgctgcacaggctgccttccagaaggtggtggctggagtggctgctgccctggctcacaagtaccactaagccccttttctgctattgtctatgcacaaaggttatatgtcccctagagaaaaactgtcaattgtggggaaatgatgaagacctttgggcatctagcttttatctaataaatgatatttactgtcatccc

SEQ ID NO: 5 - DNA, 630 bp, Mus musculus; identical to SEQ ID NO: 4

SEQ ID NO: 6 - DNA, 1397 bp, Mus musculus
tgaaagtggtcccagagtcaggcgcagcgaggtgctgctgcagagccgggtcgtggctcacgcgtcttgtgccaaaatgccgcgcttcgccttgaccgttatccgccatggtgaaacaagacttaataaggagaaaatcattcaaggacaaggcgtagatgcgcccctttcggagactgggtttcggcaagcagcggccgccgggcagtttctgagcaatgtgcagtttacccacgccttctccagcgatctcacgaggactaagcagaccatacatggcattttggagaaaagcagattttgtaaagacatggcggtgaagtacgactccaggctccgagaaaggatgtacggagtcgcggaaggcaagccgctaagcgagcttcgggccatggccaaagccgctggggaagagtgccccatgttcaccccgcctggaggagagacagttgagcaggtaaagatgcgcggaaaggatttctttgatttcatttgtcagctaatcctgggcaaggcagggcagagagaaagcgtcctgcctggagcgccaggcagcggtttggaaagctctttggcagaggttttccctgttggaaaacatggcagcttgggggcgaatcccaaaggtggcaccctgggcttagcagccagcatcttagttgtgagccatggcgcttacatgagaagcctctttggttattttctgagtgacctcagatgctcgttgccaggagcgagagacaaattggaactttcctccatcactcccaacactgggatcagtgtcttcatcatagactgtgaggaagcacgccagccatcgattcagtgcgtttgtatgaacctccaggagcacctgaacggagtgactgagaagcagcactgagtgtggagcccgtgcagtggagcctctgaagggagggacttggcctctgctgctgccattttagaagcagcggagaattcatgtgttgaagccccactggggttgtggctgtgtcagacgttagtggggaatccactcacagccagcctggcttttcctgtcattttctacactgatttttgtcactctgtcccattatgtctctgatctgttaacttatgaggacattgaggcttgcacatccggggatgagcagccttctttccacacacttccttttccttggcccttgtgatgtctaggtggtgttggcttttgaagataattgtatgatttcacactcgctcaccaagtgcttgcaagaaagaatggtttcagtaatacgctgcgtatttgcagtgatccaaagtgttcagagtgaagcttcagatcagtgttcaaggtaaagtgaccgaacactctagtgtcctggagaaactagctcttgggatttattattattattattatt

SEQ ID NO: 7 - DNA, 2840 bp, Mus musculus
ctggaccgcggcgctgcatcctcttaagtactgagtgcgaagttgctcagggtgcggttgtcgcggtcgccgctgcctctcggtccaatgagctgcaccagaatgatccatgtgctagatccacgtcctttgacaagttccgtcatgcccgtggacatggccatgaggatttgcttggctcattcaccacctctgaagagtttcctgggtccttacaatggttttcaacgaagaaattttgtgaataaattgaaacctttgaaaccatgtctcagtgtcaagcaggaagccaaatcgcagagtgagtggaagagcccacacaaccaagccaagaagcgggtcgtgtttgcggactccaaggggctgtcactcactgctatccatgtcttctccgaccttccagaagaaccagcgtgggacctgcagtttgatctcttggaccttaacgatatctcctccagcttaaaacttcacgaggagaaaaatttggtttttgattttccccagccctcaaccgactacttaagtttccgggaccgctttcagaagaactttgtctgcctcgagaactgctctttgcaagatcggacggtgaccgggacagtgaaagtgaagaatgtgagctttgagaagaaggttcaggtccggatcacctttgacacctggaaaacctacacagatgtggactgtgtctacatgaagaatgtttacagcagctcagacagcgacaccttctcctttgccatcgacttgccccgtgtcattccaactgaggagaaaattgagttctgcatttcttatcacgctaatgggaggatcttctgggacaacaatgagggtcagaattacagaattgtccatgtgcaatggaaacctgacggagtgcagactcaggtggcacccaaagactgtgcattccaacaggggccccctaagactgagatagagcccacagtctttggcagtccaaggcttgctagcggcctcttcccagagtggcagagctgggggagagtggagaacttgacctcctatcgatgagttaggcaatctacacactgcccttgtctgatcataatcctcatgcaattctagatctgtattgctcaatattaggaagtcgtagttactttctatcagtagatttaggtatgagctgttggggcctggctatagaagctatagctacttgagaattcattgttgggggtttttgagggtgatgccaccagctttgttctgaaggatcaaggacagcctgggaactagttttatacaagcgacacctttttttgggaggtgcatcatttccctctcagttcaccagctttcactttgaccaaggaaaggtttgaggactgttgatggtgatggaacgctgtggtaagggtgtgaggaatgtgaaatgtatatgccgagggctcgagtcagcggaggagccatggttaagtggatattaagccattggtgggaacacataaagttatcttgtgtttcagaatgggttctgcaggcttctcctgaggaaatagctcaaagatgggaaagaaatccattctatgcatccttgtataggaaaataaaaggatgttggatggtactgggggagaagatgaactgaagaatcaagatcttgagggctagagatgtagctcagttggtagtgtgcttgcctcgcatgcatgaagacctgggttccaggtctagcatcatacagctgggggtggcagcacatgcctctaatcccagtatgttatagggaaggcagaggcaggaggattagaaatccaaggtcatccttggcacacagaaagttggaggctagcttgggctagtcaagtccctgtctcaggaaatgatgatatcaaaagatctcaagtgaatcctttcagtttaaacatggtctaccaggaaccatgttttagagagtgttgaagcacatctggctttgcattcttaattggataagcggctttgtgatgaaggcatcactcttgggttcttgctacagaatgctgcctgacatcaggcatgttgtcaccagtgactagcagcatgtagggactccacatcgtgtcaaagagagctctttcagtgcctccattaaaccacaacactgtagctgtttaaaccagttacctgaatgctcatctaataactcatgaatgtttaggaccttatttgaaggtctattcactggtgtccttctgaaatcatcaggagggccatcagtgtacacaactcacgtccttcatattgaaggtgactcatctttctgccacactttttcaatgtgacatttgaagtggggactgacaccagagtctcaatgcaagaatccaggaccttgcacatgaaagtatcggtctatctcgtgcctaattttgtcttgctgttttaatttctagtcaaaatgcttttaaaaagtgtagatatgaattattttgaatgtgaactgtttttgcgtgcgcataaatccactttgtgggatcttgaggacaggtgtcctgggttgattgtccggtgtgcatgtactttgaggtgagttgggaaagtgcagtggattgtaatgtatgtgatctgccatgctggaaaaacactattgggatacctcccctgtgatggtatttgaggtttggctagcatccataagttctctgctgtaaatacctacattgtccctatgagcctctcacttttagaataaatgtgcttggtaaaaaaaaaaaaaaaaaaaaaaaaaaaaaaaaaaaaaaaaaaaaaaaaaaaaaaaaaaaaaaaaaaaaaaaaaaaaaaaaaaaaaaaaaaaaaaaaaaaaaaaaaaaaaaaaaaaaaaaaaa

SEQ ID NO: 8 - DNA, 204 bp, Mus musculus
ttctgattctgacagactcaggaagaaaccatggtgctctctggggaagacaaaagcaacatcaaggctgcctgggggaagattggtggccatggtgctgaatatggagctgaagccctggaaaggatgtttgccagcttccccactactaagacctacttccctcactttgatgttagccacggttctgcccaggtcaagggt

SEQ ID NO: 9 - DNA, 2895 bp, Mus musculus
gactgcctgctcgcgcctgggtgtcccggaggcggctgctgggagccacgggagcagctgcggtgctctgccatattgtgtctggcccggcccggccctcgcctctggttcgcggcggctgagtgacgaaatatacgagtaaatgggtccagtaattggaatgactccagataagagagctgagaccccgggagctgagaaggttgcaggactgagtcagatttacaaaatgggaagtttgcctgaagctggggatgctgccaggccaaaggccactcttgtgggcagtgagtcagcagatgacgagctaacaaacttgaactggcttcatgagagcagtaaccttctaacaaacctcagacttggaagtgaaggcctccccatggtcagtccgctgtatgacatagagggagatgagatgccatcctttggaccatcgtgctaccagaacccagaaaaaaaatcagcaacttcaaagcccccgtactcctttagtcttctcatttatatggctattgaacactcgccaaataaatgtttgcctgtcaaagaaatttacagctggattctggatcgcttcccatactttgccactgcacctacaggctggaagaattctgttcggcataatctatccctgaataaatgttttcagaaagtggaaagaagtcatggcaaggttaatggaaaaggctccttgtggtgcgttgatccagaatataagcccaatcttatgcaggccttaaagaagcagcctttttcttctccacaaaggtaagggcctctatgtgatttagatttattatgtgagctggagaaaacaaagctgtaagttttattttagttgtcttattttatttgtgtgtttatctaattgtacagggaagtatttactgataacattgacctaagatattttcttcttggttcatttttttttctagaaaacaaaatgctgggtagttgagtatcaattctcagaaaataagtcagtgtactgtattataagtagtaagcttaataaattgtataacttcagttgcaaaaacattaactcattttaattgtttgtatgctaacaaggacacaataaattaaatacatatttaaaatatttgagtaagatgattcatcatttgtaaccataacattttgtaaggtccatgattcgctgaagaacgatacccagactcacatagtatgcaagagcaacgagtgctttattctacagaagtccagcatgctggggtctaccatttaccaagatggacatgcccaagtgagctcacaggcccaagtgaaagcacagtaggggaattctagggagggggcaggtgacatttatcttaattgattggctctatatctagggacattcccgagccactgctgggggttgtggggactggaaactgttgctggggaagcctggaaactgttgctgacccattgtccttgtctcaggacaggtggtggggcagcttctgattggctgcccaaggcctggggtttttccagtatctcagttgcctggacttgtccagttcttggaaacagagatttaggcccagtctcctgacctgccagtgtgaatcctgtcatggagtcagcctgactctgtcctcccactgttgcctaaatcattccccctcagtcatgggccatttcgaatccttgagatgtttctgtggactgctattgttgttttagaatcattaattgaacagtggaaatctgttccttaacaaacctaactgaaggattgattatgtagggattataagtcaaggccaacctcagtagcctaagagggtcagggcagaggccatggagacctgttgaagagggactcaaactaaccctgagactgttgttttgtttgtttgttttatactgtctttctgattaaggccgtggatttttttggccatcccttagtagtcagcataaaaacaacattccttacctaaggcagctggaggaacaagaagtctaggcctcttctgttttgtaagactgcttctgccagggaggacagggcaccctgcagggccgtgatggactttcctgtctcctgtatatctgcatctatagccatccgtagagccttgtaatttttatcctcagttactaggactgagactcctacactagcagctcctgccagccctacgcccaggaaagaacctggtaacacagtgggggtggccattcttcttacagttggttcgatgcagtgggacctcactggggcaaaagcgtggtgggtcctgatgagggagcaatggtgggctgcggcagaggttggggggtggttggttgggccttgttggggcctcgggactgtgggtctcaagaggctaccttagagcagttagacattaaacaggagtcccaagtcataggcagagatgtaaagtcttagtcccaatgtctgaagtgtccgtgttggaatatgcctttattaattaagataaatttaagggttggttgtctttggtgcttagtttgttttttcaaaagtctgaaaggttattaattttcaaatacatacagaggaagaaaactaaaatgaaatctcactgaaacaaattgagaatttcctattgtagtttatttgaattcttgagaattgttaacaaaaggttatggttgaatgttgtaaacaaccaggagagtgaagttgcaatgtcagcagcctcacttctgggacattacctcagcagcatagaaggaaccaggaggatgtgtatccttatcaaacaagagttttaaggaagtggttggagccaggagtagtattgcatacctttaatcccagaactcaggaggcaaagggaggcagatctctgtgagttcaaggccagcctggtctatttgttgaaaccctgtccc

SEQ ID NO: 10 - DNA, 1120 bp, Mus musculus
gggacaggagctaatacccagaactgagttgtgtcctgctaagtcctctgccacgtacccacgggatgaagaacctttcatttcccctccttttccttttcttccttgtccctgaactgctgggctccagcatgccactgtgtcccatcgatgaagccatcgacaagaagatcaaacaagacttcaactccctgtttccaaatgcaataaagaacattggcttaaattgctggacagtctcctccagagggaagttggcctcctgcccagaaggcacagcagtcttgagctgctcctgtggctctgcctgtggctcgtgggacattcgtgaagaaaaagtgtgtcactgccagtgtgcaaggatagactggacagcagcccgctgctgtaagctgcaggtcgcttcctgatgtcggtcagttgagaactgagcttgtccttcttatgttgacagggacggggaggaggcaggggcaggtctaagctgagggtctggaaatgaagaatgagaagatggtgatgatgaagatggatggcgaagtgggcatgggccttgtgtgacttctttagtggagaagggtgtgtgtgggaattgtgtgggaaatgttgcacagtgttgtgaattttactacttgtccatcactccttttttcttctcttccccttccccttcctctttgagactctcatatagtccaggctggcctcaaatgatagtcaccatcacagaggagactggaccttggcaggactgaggttccatagctctcaagttcacttttcacctctgtggatatgatgtcgaatacctattttcaaccagaggcacccagggcatttacaccacctggggcagaggatatcgttttccttgtatcttgagcttagaataaggtatagcctgggtgctagtaactgtctatagaatgagggctggtgagatgattcagtgggtaaagatgctgctgccaaggctgatgatcagggcttgattcctggaaactacatggtggaaggagagagtccaggttgtcttcccacttccacatgggcactgaggcacttgagtaccacgtgtgcacacacagtgaatgaaagagtgaatgaatgaagcaataaa

SEQ ID NO: 11 - DNA, 1856 bp, Mus musculus
gctgacccttaaacactccagcttgacacacccccccacacacaccagctaaaaaaatgacaggaaaagccacctctgaggcttctgtctctactccagaggagacagcacctgagcctgccaaggtgcccactacagagccttctggagaggtggcagcatcagagtccaccgggcaagagcaggctccagagccacagaagcctcaggcacaggatcctgcagctcctgcagcttctgccatgcccgcagccactaagcctgaacctccgagtgaagatgtccccagtgccccactgcggctgaccttggaggatgtgagccacagctccttgactgtgagctgggagccccccgagaagctgggcaaactggggcttcaaggctatgtgttggagttctgtcgagagggagcctcagaatgggtgcctgtgaatccccggcccgtgatggtgacccagcagacggttcgaaacctggccctgggagacaagttcttcctgcgtgtgactgcagtaagctcagcaggggcaggccctccagccgttctggaccagcctgtccacatccaagagatcactgaagcccccaagatccgtgttccccgacaccttcgtcagacctacatccgccaggtgggagagtcagtcaacctgcaaatccccttccaggggaagcccaagccacaggtctcttggacccacaatggccacgctctggacaaccagagagttaatgtgcgcagcggggaccaggactccatcctcttcattcgctctgctcagcgcgcagactcaggccgctatgagctcaccgtgcatctggaaggcttggaagccaaggccagcattgacatcctggtgattgagaagcccgggcccccgagcagcatcaagctactggatgtctggggttgcaatgctgccctcgagtggacaccaccccaggacacaggcaacacagagctcctgggctacacagtacagaaggcagacaaaaggacagggcaatggttcacagtgttggagcgctatcaccccaccacctgcaccatctcagacctcatcattggcaactcgtactcttttcgggtcttctcagaaaacctgtgtggcctcagtgacttagccaccaccaccaaggagctggctcacatccacaaggcagatattactgccaaacctagagagtttattgagcgagacttctcagaagcgccctcgttcacccagcccctggctgaccatacctccactcctggctatagcacgcagcttttctgcagcgtccgagcatcacctaagcccaagatcatctggatgaaaaacaagatggacatccagggtgaccccaagtaccgtgccgtctccgagcaaggggtctgcaccctggagatccggaagcccagcccctttgattctggggtctacacttgcaaggccatcaacgtgctaggggaggcctctgtggattgtcggctggaggttaaagcttctgccacacactaaagagcaacagaggcagagactgggacaaggagacagcttggtcacataccaggacgcagaaggacactatccaccaagtcctgcagacctgaggatcaggaccccaggaatccccaagaccataggaacagcgaatggggcggggtctctagtacctgcaggccccctccatcagacgctgggtccagacccaggatcaggcctggcaggccccaggccataccttctgggttcaagagggcccagaaggggcagagactggcaccctcttcagagttgtacactgtatgagaagtattcaaataaaggtgtgtggtgttaaaaaaaaaaaaaaaaaaaaaaaaaaaa

SEQ ID NO: 12 - DNA, 2604 bp, Mus musculus
ataagtgacaatgagttcaagtgcaggcactcacagccagaatgtgggtatggcttacagcccgatcgttggacagagtacagcatacagacaatggaaccagataatctggagctcatctttgacttttttgaggaagatctcagtgagcatgtagttcagggtgatgttcttcctggacacgtgggcacagcatgcctcctgtcttctaccattgctgagagtggaagaagcgctggaatccttactcttcccatcatgagcagaaattccagaaaaactataggcaaagtcagagttgattttatcatcatcaagccattacctggatatagttgttctatgcagtcttcattttccaagtattggaaaccaagaataccattggacgttggacatcgtggtgcagggaactcaacaacgactgccaagctagctaaagtacaggaaaatactatcgcttctttaagaaatgctgccagtcatggcgcagcatttgtagaatttgatgtccacctttcaaaggactttgtgcccgtggtgtatcatgacctcacctgctgtctgaccatgaagaggaaatatgaagctgatccagttgaattgtttgaaatcccagtaaaagaattaacatttgaccaactccagttattgaagctttctcatgtgactgcattaaaaaccaaagaccggaaacaatctttgtatgaggaggaaaatttcttttctgaaaatcagccatttccttctcttaagatggttttagaatcattgccagaaaatgtaggatttaatatagaaataaaatggatttgccaacacagggatggagtatgggatggcaacttatcaacatattttgatatgaatgtgtttttggatataattttaaaaactgttttagaaaattctgggaagaggagaatagtgttttcttcttttgatgcagatatttgtacaatggttcggcagaagcagaacaaatatcccatattatttttgacccaaggaaagtctgatatttaccccgaactcatggacctcagatctcggacaacacccattgcaatgagttttgcacagtttgaaaatatttcggggataaatgcccatactgaagacctccttagaaacccatcctatgtccaagaggcaaaagctaagggattggtcatattctgctggggtgatgataccaacgatcctgaaaacagaaggaaactggaggaatttggagtaaatggtctaatatatgataggatatatgattggatgcctgaacagccaaatatattccaagtggagcagttggagcgcctgaagcaagaattgccagagcttaagaactgtttgtgtcccactgttagccacttcatcccttcttctttctgtgtggagcctgatatccacgtggatgccaacggcattgatagtgtggagaacgcttagttcacagtgcacagaggacatttaggggcacaccgctgccctcatgtttagttttcaccatcgagcactgctgttgcctcttaggtttttcagtccaatgaagcaataatgaagtattttactatttcattacaggtcccgcaagaatatcaagtatgctatttgtcacttgtccaggtataattaccaatcagtctctgtacaataagaaaatatactgttaaacatttcagtgagagatctaagcctataatggtgaatcttcattaaaagttggaaattaacgatataaatatctcatacttaaagttcaggcttttcatttgattaagtcttaaatcttcagtgcttgagaaaaatgattgcataattatacctgaccatggaaaaactaagtacctcaatgcatgcatttgcactggtggctccagctgcacaggtctgtgtcatccatgtacataggtatctttacatggttgataggaacacgcaccattttcctttagtataaacctcagattgctgccatttctcacctgacccaagccagcctgcagatgaacctcaaaacttgtctcataaaccattcaaagatattaaagttccagaatgctgcagggtaacttaatgtataaagtatttgtaagaagtatatttcgcatatatagtagtgtagatcagaaggtatcaatttgactcaatgcatgctttaggttttaagcatgagattgtacatgttcactgttaagtccttgcatctggtgctaggtgagggagatgttaaggacataaaatattttgtcgcctaaaaaacaaagtctgttttagacactttgagtatgcttatttagtgtctcactacctagtaaacataagtgtctcactacctagtaaacataattgctgtgtgttgcatagtagttaaattcccatgcagaaaaataaatgtcctgaattctcaaattggtattctttattgtttaatatatatcatgtatgtaatttatttaggaatgtagatcttactgtatataaatgcatgcttttaggattatactaagatttctttagaagcagattgtactgataaaactgtaacttcagaatgaatgttaaataaaatgacagatttatttttttcctcatcttaaaacg

SEQ ID NO: 13 - DNA, 4894 bp, Mus musculus
ccttcccccacgggcgcccagagggggctccagacatccaccccccctcacggcctcggcccgcgccgggtgagcccgaggggcccgggagcagcctcggtccctactctgcggacgccaggagccctcgccctcgaggcagccaccggctaggccacgcggccattccgcagcgactcttgccctgccaacgatgcgcctgcatggcggcggcctccccgactccaccggcgccctctctccagggccgggcccaccgaggagtcccagccaggccttcgaggacgcctcgaaagtggcggcgagcgtggcatgacgggaagaatggcatccacctgaaggccaaggctgggccttcggggcttctgcggcctaaggcggcgggtctgagcaagaacactctgccatcgccggctcgggacgggaggcccacccgtggccgagcacgcagacctggatgaaccgaggcctcgatgggcctggacgaaggtgagcggggccccgaatcacggcgagaggaacgatcgattcttgggccgcgggtcttccctccacccgagagaagccgagacgcgacaaccgcaggcggccattcggaaacgctgtcgccgtagaagtcctgtgtatataatatgaaaaagctgctctcaacctttcccccgaccctttttagacttctggctaaatctggacgtctaactgtagagattgccgacgcagggtaaaggagaggtaggagatgacgtgaatacccagtcgccataaaaagaagatcgtggacacgtcttctgcaagtgattttgaaatggaattgtttaggccgcctctagaaagacccaggagcgacactcgtccctgtttgttcagtaccttagaggatccagcaggaggaagaagaggcccggagccagattggtcgtgtgaagaagacgtgtctctcttttttatcctattgtattgtgtatgcattttagtcctcatttcttaccccccacaccatgtttgcgtgtgtgcctgtgtgtgtgtatttgagtgtgtttgaaaatgccaggttttgggggtaatgtctttctagctgctctgaagtgcctgccatattttataagtagtaaacatgctgtaaatacctttttgttaggattcatttgaattattgtttggagaagaaaagccaaacctctcctgagttgaccgcattgtgtttgtgccctggttcccagaaggaaatccagagctctaagctactgtggtccgtgagtggaaaggaaccactatctcccactaacccattttgtttggcttttctttgtacatagtgtatgtaaaggacaaaggggtcctaatttacaacatctagtcactctagatgttaaagaggttgccagtgtatgacaaagtagagttagtagaacaacacttttttttttttttttttacattttgtgttaaagttgtaattactcttgttacgtgtgccatttactgactgctgtgtatatagtggacaacagtccttacttgaaacatctggtctatctagatgtttagaagtgcccaacgtatgttaaatgtagaggtagtgaaatatcactttgtaaatatctttttgcaaacactcatgagtcgttgtctttggggagtggggtgatgagccctctgagcagtactgtctttacttgctccggggtttggaggaggtgttgggaggcagtgacaacggccatgtagtgtgtgtgtatatgggaccttttcagatgccatttttatattcttgcattttgttttgctgtgtgtatactgtatataatggacaaatatgtctaaattttcaacatctagactctagatgttaaagaggttgccaatgtatgacaaagtagtaaatttagcacatagtgtacaccgttaaaattcatagaaaattttgttctgtaaatggcttggggataggatttgctcagctgtatctaagcattacacatacctatatttgtctattggtttgaagggagaagaaagtgggtcgaagcccaaatggttatgtttagaagatacctcagataataaccattgctttgcatacagttttatttaccagtgccatgtcaatagcagataagttcttacatgaaacatctagtcttttagatatctgaaagtgcttgatacatttaaaggtacaggtaatagaataatattttgtgtatatagtttttttaaactggagaaatgctgtgtgtagaagtagaattgttagcccgcctctgagaacagtgtaccggctgtgcttgttcagtggatcaaggaggtgggagggaaggaactgcaaaaagattccatttgtgtgctagacatttctagcttacccatccccctgtgtgttgtgtgcatctcatgtaactttgctatgctgtatatattgtacatactggacaaacgagtcctatgatatctagtctctaggtattaaagaggttgccaatgtatgacaaaagtagttagtaaactcacacattctgtatactctgttagttcatagcaaggttgtcttctgaagagttgtgaaagtgtatcatccaagtgacgagtgacataggcacccgtgcctatgtcacgggacacaagatgggctgaaggggaagaaaggtcggagaccagaatgtcctcaccagaagacacttggagatctaactagttacatgtgtgtggtttcagtactactatgtatataggggacaaattcatgtcctcatctgaaacatctagtccttctaggtgtttagaagtgcacaaagtatgttaaaagtagacatagtaaataatacgtgttgtagattctgtttaaactcatggtgaagtgttgtcttttggaactagaaagagaaactgcttctgagcaatgcagccttgcttgtgcaggtctaggagggaggaagaaaatgaatgaagagcctaatgctgatgcaagtttggtaatacaaggttatccattgttgcttatatctgtgcatcttactttgcaatgtatagaaaacataggtccaaatttgcagcacccagtcttcctagactgtaaaggtgccagtgtgtgacaaagtagagttagtgaaaagacatatttatagattatgttaaaatttgtaggaaaaaaaccttaaaaccacttaggaagtgaaattgttaatattccacaaaaacatgacagatgcatacacatggcccctggggggagagaactggaagaggggctggaccagaaccttgctgtttagaaggcagtctgaccacagcctttgttaggtgtgcagtgtattcactgtggtgtacacatgctggggaaaccaaagtgcttactgggaacatctggtctccagccttttaggtgcatgatagacctgatgtggtaatgcatgcctttaattctaggctgaggcaggtggatctctgttctgggtcaaccagggctatagactttgtctcaaaacagtgagaaagtgtacataacggattggtagggtggctcagcatgtaaaggtgcttgctactaagctggtgacctgagtttgatttccgggatccacttgataaaagcgattcacagcttgtcttttagcctccacacaagtgcagtggcacatgtgcacacatgcatacagtattgcatacatgtaaaaatagagggctgacaccactttgttaacgatgattttgttacaggaatggtcacactgggggaatggaggttaagcttggcctttgagcagatgctgttaccaggtgatggaggtgggctagggcaaagcttagtgctcagaaagaggcactgtagctgttggttggttcgagttgtctagccattggttgggtgtgcatttcacttaatgttgccaggtagtagaggtaagtcccagtgcctaaaggatgttagaagtagcaagagtcactaaaggccaggctcatctttggggagggctgttttcttggtgtggcctttgttaatcctctcactagcatcatctgcacttaggagttgtgcagtgaagaggatggctgagggaaaggctgctagtgcctctgtccaggggacagctctacccaggggtcctatgtgcatcgtggtaaaatcttgtgttcattatgcacagttgtcatctgaatgttacatcctaaaggaaagcacatggttaagagtagagctaatggctatggtggaattgacaaaagggttcctcttgaacatggaactgctaagccatgtctggccagtgtggggaaattcatgttgctaggctgactggagggacacaggttcacaggatgaggtctgcaggtgtgttgagactgacatcctgagagcccctaccgtaggtgtgtctcccagctgctccgtgtggaatacatttgttgagtgggaagatcccttctacatatgctagtatatagatctggtgataagcttaggaatgctatacttagtgtggtctgttgctttgtgtttccttgtaagctgagactgagcgaatgcagaatttaattgtaactttgccagtacatctatctagaggcctgctgccatttttgtcttctatgaaatttctgttgccaaggaagacaggattacaattttgtctgacagattgagatggcatggtgtattcttggttatcaaaatccctgtgtagtgtggggtttttaattggtgaatattcacaatgtggggaaagcatggtacatactgtataatctcaattacccaagtgtgtgtacgcttgcaggatctagaacaatacatcgagctgagctgcttgtgactgggtgactttgttcttgctttcttgtttcctgtaatgcatatactaaaaaaataaacaaaagcttctttaaagaaaaaaaa

SEQ ID NO: 14 - DNA, 630 bp, Mus musculus; identical to SEQ ID NO: 4

SEQ ID NO: 15 - DNA, 8515 bp, Mus musculus
gggcggcgcgccgggtcccggggcgcagccccgacgctcattggcctgggcggcgcagccaagctgtcagcccatgtggcgtggccgcgcggggatggccgcggtttaaatagcgccggcgcggcctagagggagccagagagacggcagcggcgtcccgtccagttcgcctgccgcgctcctcgcttgtcgtctgcctccagagcccagacagagaagagccatggaggaggtggtgatagccggtatgtcggggaagttgcccgagtcagagaacctacaggagttctgggccaacctcattggtggtgtggacatggtcacagatgatgacaggagatggaaggctgggctctatggattacccaagcggtctggaaagctgaaggatctctccaagttcgacgcctccttttttggggtccaccccaagcaggcacacacaatggacccccagcttcggctgctgttggaagtcagctatgaagcaattgtggatggaggtatcaacccagcctcactccgaggaacgaacactggcgtctgggtgggtgtgagtggttcagaggcatccgaggcccttagcagagatcccgagacgcttctgggctacagcatggtgggctgccagcgtgcaatgatggccaaccggctctctttcttcttcgacttcaaaggaccaagcattgccctggacacagcctgctcctccagcttgctggcactacagaatgcctaccaggccatccgtagtggggaatgccccgcggcccttgtgggtgggatcaacctgctcctgaagccgaacacctctgtgcagttcatgaagctgggcatgctcagcccggacggcacctgcagatcctttgatgattcagggagtggatattgtcgctctgaggctgttgtagcagttctgctgactaagaagtccctggctcggcgggtctatgccacgattctgaatgccggcaccaatacagatggcagcaaggagcaaggtgtaacattcccctctggagaagtccaagaacaactcatctgctctctgtatcagccagctggtctggccccggagtcgcttgagtatattgaagcccatggcacgggcaccaaggtgggtgacccccaggaactgaatggcattactcggtccctgtgcgccttccgccaggcccctctgttaattggctccaccaaatccaacatgggacaccctgagcctgcctctgggcttgcagccctgaccaaggtgctgttatccctggagcatggggtctgggcccctaacctgcacttccacaaccccaaccctgagatcccagcacttcttgatgggcggctgcaggtggtcgataggcccctgcctgttcgtggtggcaacgtgggcatcaactcatttggcttcggaggctccaatgttcatgtcatcctccagcccaacacacggcaggcccctgcgcccactgcacacgctgcccttccccatttgctgcacgccagtggacgcaccttagaggcagtgcaggacctgctggaacagggccgccagcacagccaggacctggcctttgtgagcatgctcaatgacattgcggcaacccctacagcagccatgcccttcaggggttacactgtgctaggtgttgagggccgtgtccaagaagtgcagcaagtgtccaccaacaagcgcccactctggttcatctgctcagggatgggcacgcagtggcgcgggatggggctgagcctcatgcgcctggacagcttccgtgagtctatcctgcgctccgatgaggctgtgaagccgttgggagtgaaagtgtcagatctgctgttgagcacagatgagcgcacctttgatgacatcgtgcatgcctttgtgagcctcactgccatccagattgccctcatcgacctactgacttctgtgggactgaaacctgacggcatcattgggcactccttgggagaggttgcctgtggctatgcagatggctgtctctcccagagagaggctgtgcttgcagcttactggcgaggccagtgcatcaaagatgcccacctcccgcctggatccatggcagctgttggtttgtcctgggaggaatgtaaacagcgctgccccgctggcgtggtgcctgcctgccacaactctgaggacaccgtgaccatctctggacctcaggctgcagtgaatgaatttgtggagcagctaaagcaagaaggtgtgtttgccaaggaggtacgaacaggaggcctggctttccactcctacttcatggaaggaattgcccccacattgctgcaggctctcaagaaggtgatccgggaaccacggccgcgctcggctcgatggctcagcacctctatccctgaggcccagtggcagagcagcctggcccgcacatcttctgccgagtacaatgtcaacaacctggtgagccctgtgctcttccaggaagcactgtggcacatccctgagcatgccgtggtgctggagattgcgccccacgcactgttgcaggctgtcctgaagcgaggcgtgaagtccagctgcaccatcattcccttgatgaagagggatcataaagataacttggagttctttctcaccaaccttggcaaggtgcacctcacaggcatcaatgtcaaccctaacgccttgttcccacctgtggagttcccggctccccgagggactcctctcatctcccctcacatcaagtgggaccacagtcagacttgggatgtcccggttgctgaggacttcccaaacggctccagctcctcctctgctacagtgtacagcatcgacgccagtcctgagtcgcccgaccactacctggtagaccactgcattgacggccgggtcatcttccctggcactggctacctgtgcctggtgtggaagacactggctcgcagcctgggcttgtccctagaagagacccctgtggtatttgagaatgtgtcgtttcatcaggccactatactacccaagacaggaaccgtggcgctggaggtgaggctgctagaggcctcccatgcctttgaggtgtctgacactggcaatctgattgtgagcggaaaagtgtacctgtgggaagacccgaactccaagttattcgaccacccagaagtcccaacaccccctgagtctgcatcggtctcccgcctgacccagggagaagtatacaaggagctgcggctgcgtggctatgattatggccctcagttccagggcatctgtgaggccacccttgaaggtgaacaaggcaagctgctctggaaagataactgggtgaccttcatggacacaatgctgcaggtatccattctgggttctagccagcagagtctacagctacctacccgtgtgaccgccatctatatcgaccctgccacccaccgtcagaaggtgtacagggtgaaggaggacactcaagtggctgatgtgacaacgagccgctgtctgggcataacggtctctggtggtatccacatctcaagactacagacgacagcaacctcacggcggcagcaagaacagctggtccccaccttggaaaagttcgttttcacaccgcacatggaggctgagtgcctgtctgagagcactgccctgcagaaggagctgcaactgtgcaagggtctggcacgggctctgcagaccaaggccacccagcaagggctgaaggcggcaatgcttgggcaagaggaccctccacagcacgggctgcctcgactcctggcagctgcttgccagttgcagctcaacgggaacctgcagctggagctgggagaagcgctggctcaagagaggctcctgctgccagaagaccctctgatcagtggcctcctcaactcccaggccctcaaggcctgcgtagacacagccctggagaacttgtctactctcaagatgaaggtggcagaggtgctggctggagaaggccacttgtattcccgaatcccggcactgctcaacacccagcccatgctacaactggaatacacagccaccgaccggcacccccaggccctgaaggatgttcagaccaaactgcagcagcatgatgtggcgcagggccagtggaacccttccgaccctgcgcccagcagcctgggtgcccttgaccttctggtgtgcaactgtgcattagccaccctgggggatccagccttggccctggacaacatggtagctgccctcaaggaaggtggtttcctgctagtgcacacagtgctcaaaggacatgcccttggggagaccctggcctgcctaccctctgaggtgcagcctgcgcccagcctcctaagccaggaggagtgggagagcctgttctcgaggaaggcactacacctggtgggccttaaaaggtccttctacggtactgcgctgttcctgtgccggcgagccatcccacaggagaaacctatcttcctgtctgtggaggataccagcttccagtgggtggactctctgaagagcactctggccacgtcctcctcccagcctgtgtggctaacggccatggactgccccacctcgggtgtggtgggtttggtgaattgtctccgaaaagagccgggtggacaccggattcggtgtatcctgctgtccaacctcagcaacacatctcacgcccccaagttggaccctggctctccagagctacagcaggtgctaaagcatgacctcgtgatgaacgtgtaccgggacggggcctggggtgccttccgtcacttccagttagagcaggacaagcccaaggagcagacagcgcatgcctttgtaaacgtcctcacccgaggggacctcgcctccatccgctgggtctcctcccccctgaagcacacgcagccctcgagctcaggagcacagctctgcactgtctactacgcctcactgaacttccgagacatcatgctggccacgggcaagctgtcccctgatgccattccaggtaaatgggccagccgagactgcatgctcggcatggagttctcaggccgggataggtgtggccggcgtgtgatggggctggttcctgcagaaggcctggccacctcagtcctgctatcatctgacttcctctgggatgtaccctccagctggaccctggaggaggcggcctctgtgcccgtcgtctataccactgcttactactcgttagtggttcgcgggcgcatccagcgtggggagaccgtgctcatccactcaggttcaggtggtgtgggccaagcggccatttccattgccctcagtctgggctgccgcgtcttcaccactgtgggctctgcagagaagcgagcatacctccaggccaggttccctcagcttgatgacaccagctttgccaactcgagggacacatcatttgagcagcacgtgttactgcacacaggtggcaaaggggtcgacctggtcctcaactcactggcagaagagaagctgcaggccagtgtgcggtgcttggctcagcatggtcgcttcttagagattggcaaatttgatctttctaacaaccaccctctgggcatggctatcttcttgaagaacgtcactttccatgggatcctgctggacgccctttttgaggaggccaatgacagctggcgggaggtggcggcactcctgaaggctggcattcgtgatggagtcgtgaagcccctcaagtgcacagtgtttcccaaggcccaggtggaagatgccttccgctacatggctcaggggaaacacattggcaaagtccttgtccaggtacgggaggaggagcctgaggctgtgctgccaggggctcagcccaccctgatttctgccatctccaagaccttctgcccagcccataagagttacatcatcactggtggcctaggtggctttggcctggagctggcccggtggctcgtgcttcgcggagcccagaggcttgtgctgacttcccgatctggaatccgcaccggctaccaagccaagcacattcgggagtggagacgccagggcatccaagtgctcgtgtcaacaagcaacgtgagctcactggagggggcccgtgctctcatcgccgaagccacaaagctggggcccgttgggggtgtcttcaacctggccatggttttgagggatgccatgctggagaaccagaccccagagctcttccaggatgtcaacaagcccaaatacaatggcaccctgaaccttgacagggcaacccgggaagcctgccctgagctggactactttgtggccttctcctctgtaagctgcgggcgtggtaatgctggccaaactaactacggcttcgccaactctaccatggagcgtatatgtgaacagcgcaggcacgatggcctcccaggccttgccgtgcagtggggtgccattggtgacgtgggcattgtcctggaagcgatgggcaccaatgacacagtcatcggaggtacgctgcctcagcgcatctcctcctgcatggaggtactggacctcttcctgaatcagccccacgcagtcctgagcagctttgtgctggcagagaagaaagctgtggcccatggggacggggacacccagagggatctggtgaaagctgtagcacacatcctaggcatccgagacctcgcaggtattaacctggacagcacgctggcagacctcggcctggactcgctcatgggtgtggaagttcgtcagatcctggaacgagaacacgatctggtgctgcccatgcgtgaggtgcggcagctcacgctgcggaaacttcaggaaatgtcctccaagactgactcggctactgacacgacagcccccaagtccaggagtgacacgtctctgaagcagaaccaactgaacctgagcacactgctggtgaaccctgagggtcctaccctaacccagctcaactcggtgcagagctctgagcggcctctgttccttgtgcaccccattgagggttccaccaccgtgttccacagtctggctgccaagctcagtgtgcccacctacggcctgcagtgcacccaagctgcccccctggatagcattccgaacctggctgcctactacatagattgcatcaagcaagtgcagcctgagggaccctaccgcatagctgggtactcatttggagcctgtgtagccttcgagatgtgctcccagctgcaggcccagcagggcccagccccgacccacaacaacctcttcctgtttgacggctcacacacctacgtgttggcctacacccagagctaccgggcaaagatgaccccaggctgtgaagccgaggccgaggctgaggccttatgcttcttcataaagcagtttcttgatgtggaacacagcaaggtgctggaggccctgctgccactgaagagcctggaagatcgggtggctgcctccgtggaccttatcactaagagtcaccacagcctggaccgccgagagctgagctttgctgccgtgtccttctaccacaagctccgggcagctgatcagtataagcccaaggccaagtaccatggcaacgtgacactgctgcgtgccaagacaggcggcacctatggcgaggacttgggtgctgactacaacctctcccaggtgtgtgacgggaaggtgtctgtgcacatcattgagggtgaccaccgcacactgctggagggcagtggcctggaatccatcatcaacatcatccatagctccctggctgagccacgagtgagtgtacgggagggctagacctgccgaccaccatgaagccacgctccacacctgccaccagagatgctccgatccccaccacaccctgagtgcaggaactggggagggtcctgctggtgggacccctccccccagtggcccagcaccacccgctcccctggtggctgctacaaacagaccatcacgcgtgtgtttcccagccgcgtagtggggttcccagagccactgacttggagacaccctggtctgtgaagagtcagtggaggcaggagccaaactgagccttttctaccgtgtggcatttgccacgctggtcgtttctccattaaattctcatatttattgcattgctgggaaagacccccaggggtgactcattccagaaccccctaaaatgggagaagccatgtggggaagatttctgggaaagtttctagactcaatacacaggctgctggctggagcccctttttgtcttgtcctgtccctgctcactgcagggcaggatatggagagggctggttcccagggaacaaggaccccagcagacactgtagcccgtggcccttggtccccagcatccccggctgccccatgatgcagggccatcctgactctgcggaccgcaccgggcactgactgtctgttttccaagacgaaaatgatgcttgggttttgacttttctgcagctgtcagtgtgaagaagtgtctggactgtgtcatttttacaccaacctggtaaaaatgctgctcttgatgctctcctgatcccacaattaaactgcacgtgagcg

SEQ ID NO: 16 - DNA, 954 bp, Mus musculus
gccgcaaccctcaaggaccacctgattgtgaatcttcttaaggaagaacaggtcccccaaaacaagattattgttggggttggtgctgttgtcatggcttgtgctatcagtatcttaatgaaggacttagtggatgagcttgcccttgttgatgttgaaaacaagctaaagggagagatgatgtatctcgagcatccatcaaaaattgtctccagcaaagactattgtgtaactgcaaactccaagctggtcattatcacactggtggcctgtcagcatgagggagaaagccgactcagtttggtccacagaaacgcgaacatctttaagttcatcattgctaacattgtgaagtaccatccacactgcaagctgcttattgtctcaattccagtggatatcttgacctatatggcttggaaaatcagtggctttcccaaaatccgagttattggaagtggttgcagtctggattcagctcagttctgttacctgatgggagaaaggctgggggttcacgcgatgagctgtcacggctgggtcctgggagaacatggcgactccagtgtgcctgtgtggagtggtgtgaacgttgccggcatctccctgaagtctctgaacccagaattgggcactgatgcagacaaggagcagtggaaggaggttcacaagcaggaggtggacagttcctacgaggtgatcaagctgaaatgggccattggcctttctgtggcagacttgttcgagagcataatgaagaaccttaggcgggtgcatcccatttccaccatgattaagggtctctatggaatcaatgatgatgtcttcctcagtgtctcatgtatcctgggacaaaatggaatctcagatgttgtgaaggtgacactgactcctgaggaagagggtcgcttgaagaagagtgcagatacactctggggaatccagaaagagtag

SEQ ID NO: 17 - DNA, 564 bp, Mus musculus
cacttctgattctgacagactcaggaagaaaccatggtgctctctggggaagacaaaagcaacatcaaggctgcctgggggaagattggtggccatggtgctgaatatggagctgaagccctggaaaggatgtttgctagcttccccaccaccaagacctactttcctcactttgatgtaagccacggctctgcccaggtcaagggtcacggcaagaaggtcgccgatgcgctggccagtgctgcaggccacctcgatgacctgcccggtgccttgtctgctctgagcgacctgcatgcccacaagctgcgtgtggatcccgtcaacttcaagctcctgagccactgcctgctggtgaccttggctagccaccaccctgccgatttcacccccgcggtacatgcctctctggacaaattccttgcctctgtgagcaccgtgctgacctccaagtaccgttaagctgccttctgcggggcttgccttctggccatgcccttcttctctcccttgcacctgtacctcttggtctttgaataaagcctgagtaggaagaagcctgca

SEQ ID NO: 18 - DNA, 1085 bp, Mus musculus
tggggtccgcgaggttgggtgcttaactagcgcccccatccaccatgttttctgacggaatctagcctggtttttttttttttttttttttttaatcgaaaaccatatggaaatgttcggagagctccagggaacctaggttccctggcttcggcagagcccgggctaacgcgcgagcgcggcgagactgtcctagcaggtgttcccggagagagaggcgatggcgtctaatagtaactggctttctggagtgaatgtcgtgctggtgatggcgtacgggagcctggtattcgtactgctgtttatttttgtgaagagacaaatcatgcgctttgcaatgaaatctagaaggggacctcatgttcctgtaggacacaatgcccccaaggacttaaaagaggagatcgatattcgactatccagggttcaagatatcaagtatgaaccccagctccttgcagatgatgataccagactactgcagctggaaacccaggggaatcaaagttgctacaactatctgtacagaatgaaagctctagatgccatccgtgcctctgagatcccgtttcatgctgaaggccggcacccctgttctttaatgggtaagaatttccgctcctacttgctagatctgcgaaatactagcactcctttcaagggtgttggcaaggccctcattgatactctcctggatggatatgagacagcccgctatgggacaggggtctttggccagagtgagtacttacgatatcaagaggccttgagtgagctggccactgtgtgagtatggtggggacctgaaagaaggctagttagacatatatgtaccgtaaggagaaaaatcacaaggtctacaccagaccaggctgtatctaaactaaataagtaaacaaaagtataggagaatacagaagagctacactgttctcataaaacttgccaggattaaatacaaaagtggatattttgctctataagctagcaagagaaacttgaactttgtgagcatatcttgggttttattcttgttttgggttttatttttttgtctaccccactaaaatgtcaaataaatctct

SEQ ID NO: 19 - DNA, 2618 bp, Mus musculus
acagttggccttccctctgggaacacaccctcggtcaacaggggaaatccggcaaggcgctcagcgatctctgatccagaccttccaaaaggaagaaaggtggcaccagagttcctgcctctctccacaccattgcaattatgcctcctcagctgcataacggtctggacttctctgccaaggttatccagggcagcctcgacagcctgccccaggcagtgaggaagttcgtggaaggcaatgctcagctgtgccagccggagtatatccacatctgcgatggctccgaggaggagtacgggcagttgctggcccacatgcaggaggagggtgtcatccgcaagctgaagaaatatgacaactgttggctggctctcactgaccctcgagatgtggccaggatcgaaagcaagacagtcatcatcacccaagagcagagagacacagtgcccatccccaaaactggcctcagccagctgggccgctggatgtcggaagaggactttgagaaagcattcaacgccaggttcccagggtgcatgaaaggccgcaccatgtatgtcatcccattcagcatggggccactgggctcgccgctggccaagattggtattgaactgacagactcgccctatgtggtggccagcatgcggatcatgactcggatgggcatatctgtgctggaggccctgggagatggggagttcatcaagtgcctgcactctgtggggtgccctctccccttaaaaaagcctttggtcaacaactgggcctgcaaccctgagctgaccctgatcgcccacctcccggaccgcagagagatcatctcctttggaagcggatatggtgggaactcactactcgggaagaaatgctttgcgttgcggatcgccagccgtctggctaaggaggaagggtggctggcggagcatatgctgatcctgggcataactaaccccgaaggcaagaagaaatacctggccgcagccttccctagtgcctgtgggaagactaacttggccatgatgaaccccagcctgcccgggtggaaggtcgaatgtgtgggcgatgacattgcctggatgaagtttgatgcccaaggcaacttaagggctatcaacccagaaaacgggttttttggagttgctcctggcacctcagtgaagacaaatccaaatgccattaaaaccatccagaaaaacaccatcttcaccaacgtggccgagactagcgatgggggtgtttactgggaaggcatcgatgagccgctggccccgggagtcaccatcacctcctggaagaacaaggagtggagaccgcaggacgcggaaccatgtgcccatcccaactcgagattctgcacccctgccagccagtgccccattattgaccctgcctgggaatctccagaaggagtacccattgagggtatcatctttggtggccgtagacctgaaggtgtcccccttgtctatgaagccctcagctggcagcatggggtgtttgtaggagcagccatgagatctgaggccacagctgctgcagaacacaagggcaagatcatcatgcacgacccctttgccatgcgacccttcttcggctacaacttcggcaaatacctggcccactggctgagcatggcccaccgcccagcagccaagttgcccaagatcttccatgtcaactggttccggaaggacaaagatggcaagttcctctggccaggctttggcgagaactcccgggtgctggagtggatgttcgggcggattgaaggggaagacagcgccaagctcacgcccatcggctacatccctaaggaaaacgccttgaacctgaaaggcctggggggcgtcaacgtggaggagctgtttgggatctctaaggagttctgggagaaggaggtggaggagatcgacaggtatctggaggaccaggtcaacaccgacctcccttacgaaattgagagggagctccgagccctgaaacagagaatcagccagatgtaaatcccaatgggggcgtctcgagagtcaccccttcccactcacagcatcgctgagatctaggagaaagccagcctgctccagctttgagatagcggcacaatcgtgagtagatcagaaaagcaccttttaatagtcagttgagtagcacagagaacaggctaggggcaaataagattgggaggggaaatcaccgcatagtctctgaagtttgcatttgacaccaatgggggttttggttccacttcaaggtcactcaggaatccagttcttcacgttagctgtagcagttagctaaaatgcacagaaaacatacttgagctgtatatatgtgtgtgaacgtgtctctgtgtgagcatgtgtgtgtgtgtgtgtgtgtgtgtgtgtgtgtgtgtgtgtgtgtgtgtacatgcctgtctgtcccattgtccacagtatatttaaaacctttggggaaaaatcttgggcaaatttgtagctgtaactagagagtcatgttgctttgttgctagtatgtatgtttaaattatttttatacaccgcccttacctttctttacataattgaaattggtatccggaccacttcttgggaaaaaaattacaaaataaa

SEQ ID NO: 20 - DNA, 852 bp, Mus musculus
aatgtagcacaattcctcatagaaattgatcattcagagagaagaataggtccccaaaacaagattacagttgttggggttggtgctgttggcatgacttgtgccgtcagtatcttaatgaaggacttggcagatgagcttgcccttgttgacatcatgcaagacaagctaaagggagagatgatggatctccagcatggcagccttttccttagactaccaaaaattgtctccagcaaagactattgtgtaactgcaaactccaagctggtcattatcacagtgggaatccatcagcaagagggagagaaaagtggctttgccaaaagcccagttattggaagtggttgcaatctggattcagctaggttctcttacctgataggagaaaggctgggagttcactctctaagctgtcatgggtgggtcctgggagaggatgatgactccagtgtgactgtgtggaatggtgtgaatgttgctggcatctccctgaagtctctgaacggagacctgggcacagataaagataaggagcagtggaaggatgttcacaagcaagtatttgacaacgcctatgaggttatcaaggtgagaggttacacagactggtccattgacatctttgtgacagacttggttgagatcataatgaagaacattaggcagctgcatcccatttctaccatgattaagggtctctatggaatcgtcttcctcagtgtcccatgcaccctgggacaaaatggaatctcagatgttgtgaaggtaacattgactcctgaggaagaggcccacgtgaagacgagtgcagatatcctctggggaatccagaaggaactgcagttctaa

SEQ ID NO: 21 - DNA, 6016 bp, Mus musculus
agtacttgtctgactcaagcctgcctccttcttcatctggtaacacaagaggtgcacctggccctgagctgccaccaatagcccgcagccatgagttccgacgctgagatggccgttttcggggaggctgctccttacctccggaagtctgaaaaggagcgaatcgaggcccagaacaagccttttgatgccaagtcatcggtgtttgtggtggatgctaaggagtcctatgtgaaagcaacagtgcagagcagggaaggggggaaggtgacagccaagaccgaaggcggagctacggtcaccgtcaaggatgatcaagtcttctccatgaaccctcccaagtacgacaagattgaggacatggccatgatgacccacctgcacgagcccgctgtgctgtacaacctcaaagagcgttatgcagcctggatgatctacacttactcaggcctcttttgtgtcaccgtcaacccctacaagtggctgccggtgtacaaccctgaggtggtggcagcctaccgaggcaaaaagcgccaggaggccccaccccacatcttctccatctctgataacgcctaccagttcatgctgacggatcgtgagaatcagtccatcctgattactggagaatccggggccgggaagactgtgaacacgaagcgtgtcatccagtactttgcaacaattgcagtcactggggacaagaagaaggaggaggcgacttctggcaaaatgcaggggacccttgaagatcaaattatcagtgccaaccccctgctggaggccttcggcaacgccaagactgtgaggaacgacaactcttctcgatttggtaaattcatcagaatccatttcggtgccacaggcaaactggcctctgcagatattgaaacctatctgctagagaagtccagagtcaccttccagctcaaggctgaaaggagctaccacatcttctaccaaatcatgtccaataagaaaccagagcttattgagatgcttctgatcaccaccaacccatatgactttgcttacgtcagtcaaggtgaaatcacagtgcccagcattgatgaccaggaagagctgatggccacagacactgctgttgatatcctgggattcagtgcagatgaaaaggtggccatttacaagctcacaggcgctgtgatgcattatgggaacatgaaattcaagcaaaagcaaagggaagagcaggctgagccagacggcaccgaagttgctgacaaggctgcctatctgacaagtctgaactctgctgacctgctcaaagccctctgctaccccagggtcaaggtcggcaatgagtatgtcaccaaaggccagacggtgcagcaggtgtacaactccgtgggtgccctggccaagtccatgtatgagaagatgttcctatggatggtcacccgcatcaaccagcagctggacaccaagcagccccggcagtacttcatcggggtcttggacattgctggctttgagatctttgacttcaacaccttggagcagctgtgcatcaacttcaccaatgagaaactgcaacagtttttcaaccaccacatgttcgtgctggagcaggaggagtacaagaaggagggcattgattgggagttcattgacttcgggatggacctggcggcctgcatcgagctcatcgagaagccgatgggcatcttctccatcctggaagaggagtgcatgttccctaaggcgacagacacctccttcaagaacaagctgtatgagcagcatcttggaaagtccaacaacttccagaagcccaaacccgccaaaggcaaggctgaggctcacttctccctggtgcactatgcgggcaccgtggactacaacattattggctggctggacaagaacaaggaccccctgaatgagaccgtggtggggctgtaccagaaatccgggttgaagactctggctttcctattttctgggggacaagctgcggaagcagagggcggcggtggaaagaaaggtggcaagaagaagggttcttctttccagaccgtgtcagctctcttcagggagaatttaaataagctgatgaccaacttgaagagcacccacccccactttgtcagatgcctcattcccaatgaaactaagactcctggtgccatggagcatgaactggtcttgcaccagctcaggtgtaacggggtgctggaaggcatccgcatctgtaggaaggggttccccagcaggatcctctatgcagacttcaagcagagatacaaagtcctgaatgcaagtgccatccctgagggtcagttcattgatagcaagaaggcctctgagaaacttctgggttccattgacattgaccacactcagtacaaattcggtcacactaaggttttctttaaagccggcctgttgggaactctagaggagatgcgagatgaaaagctggctcagctcatcacccgcactcaagccgtgtgcagagggtacctgatgagggtggagttcaaaaagatgatggagaggagagagtccatcttctgcattcagtacaacgtccgcgccttcatgaatgtgaaacactggccctggatgaagctgtatttcaagatcaaacctctgctgaagagcgcggagaccgagaaggagatggccaacatgaaggaagattttgagaaggccaaggaggatctggctaagtcagaggcaaaaaggaaggaactagaagaaaagatggtagctttgatgcaggagaaaaatgacctgcagctccaggttcaagctgaagcagatggcttggctgatgctgaggaaaggtgcgaccagctgatcaaaaccaaaatccagctggaggccaaaatcaaagagctgaccgagagggccgaggacgaggaggagatcaacgcggagctcacggccaagaagaggaagctggaggacgagtgctcagagctgaagaaggacattgacgaccttgagctgacactggccaaggttgagaaggagaagcacgccacggagaacaaggtgaaaaacctgacagaagagatggcaggcctggatgaaaatatcgccaagctgaccaaggagaagaaggccctccaggaggcccaccagcagaccctggatgacctgcaggcagaggaggacaaagtcaacaccctgaccaaagccaaaaccaagctggaacagcaagtggatgaccttgaaggatcactggaacaggaaaagaagctgaggatggacttagaaagagccaagaggaaactggagggggacctgaaactggcccaagagtccacaatggacatagaaaacgataaacagcagctcgatgagaaactcaaaaagaaagagtttgaaatgagcaatctgcagagcaagattgaggacgagcaggccctcggcatgcagctgcagaagaagatcaaggagttgcaggcccgcatcgaggagctggaggaggaaatcgaggcagagcgggcctccagggctaaagcagagaagcagcgctctgacctctcccgggaactggaggagatcagcgagaggctggaagaagctggcggagccacttcagcccagatcgagatgaacaagaagagagaggctgagttccagaaaatgcgcagggacctggaggaggccacgctgcagcatgaagccacagcagccgctcttcggaagaagcacgcggacagcgtggctgagctcggggagcagatcgacaacctgcagcgggtgaagcagaagctggagaaggagaagagcgagctgaagatggagatcgatgatctcgctagtaacatggagacagtctccaaagccaaggggaaccttgagaagatgtgccgcaccctggaggaccaactgagtgaagtgaagaccaaggaggaggagcagcagcgcctgatcaatgaactgtcaacccagaaggcacgcttgcacacagagtcaggcgagttttcccgacagctggatgaaaaagacgctatggtttctcagctttcccgaggcaaacaagcatttacacaacagattgaggaactaaagaggcagctagaggaagagtccaaggccaagaacgcactggcccacgccctgcagtcagctcgccatgactgtgacctgctgcgggaacagtatgaagaggagcaggaagccaaggctgagctgcagagggccatgtccaaggccaacagcgaggtagcccagtggaggacgaaatatgagacggatgccatccagcgcacagaggagctggaagaggccaagaagaagctggctcagcgtctgcaggatgctgaggaacatgtagaagctgtgaattccaaatgcgcttctcttgaaaagacgaagcagcggcttcagaatgaagtggaggacctcatgattgacgtggagaggtctaacgctgcctgcgctgcgcttgataagaagcagaggaactttgacaaggtcctggcagaatggaaacagaagtacgaggaaactcaggctgagcttgaagcctcccagaaggagtcccgctctctgagcactgagctgttcaaagtgaagaatgcctatgaggagtctctggatcaacttgagacgttaaagagagagaacaagaacctgcagcaggagatctctgacctgaccgagcagattgctgagggagggaagcacatccatgagctggagaaaatcaagaagcaaattgatcaggaaaagagtgaattacaggcttctctggaggaagcggaggcatcccttgaacatgaagaaggtaaaatcctacgcatccagctggagttgaaccaggtgaaatctgagattgaccgcaaaattgctgaaaaagatgaagagatagatcagctgaagagaaaccacctcagagttgtggagtccatgcagagcacgctggacgccgagatccgcagcaggaatgatgctctgaggattaagaagaagatggagggagacctcaatgagatggagatccagctgaaccatgccaaccgccaggctgcggaggcaatcaggaaccttcggaacacccagggaatgctgaaggacacacagctgcacctggacgatgctctcagaggccaggacgacctgaaagagcagctggccatggttgagcgcagagccaacctgatgcaggctgagatcgaggagctcagggcatccctggaacagacagagaggagcaggagagtggccgagcaagagctactggatgccagtgagcgcgtgcagctcctccacacccagaacaccagcctcatcaacaccaagaagaagctggagacagacatttcccaaatccagggagagatggaagacatcgtccaggaagcccgcaacgcagaagagaaggccaagaaagccatcactgatgccgccatgatggcggaggagctgaagaaggagcaggacaccagcgcccacctggagcggatgaagaagaacatggagcagaccgtgaaggacctgcagcaccgtctggacgaggctgagcagctggcgctgaagggcggcaagaagcagatccagaaactggaggctagggtgagggagcttgaaaacgaggtggaaaatgaacagaagcgcaacatcgaagccgtcaagggtcttcgtaagcacgagcgcagagtgaaggaactcacctaccagaccgaggaggaccgcaagaacgtgctgaggctgcaggacttggtggacaaactacagactaaagtgaaagcctacaagagacaggctgaggaggctgaggaacaatccaatgtcaacctggccaagttccgtaagatccagcacgagctggaggaagccgaggagcgggctgacatcgcggagtcccaggtcaacaagctgcgggtgaagagccgagaggttcacactaaagtcataagcgaagaataatccatctttctgttgagaggtgacaggagaaatcacaaaatgtgacgttctttgtcactgtcctgtatatcacggaaataaattctgcagataattttgcaatcta

SEQ ID NO: 22 - DNA, 1894 bp, Mus musculus
gtcttttcagtcgggcgctgagtgggttttcggatcatgtctggtggctccgcggattacaacagagaacatggcggcccagagggaatggaccccgatggtgtcatcgagagcaactggaatgaaattgttgataactttgatgatatgaatttaaaggagtcccttcttcgaggcatctatgcatatggttttgagaagccttcagctattcagcaaagagctattatcccttgtattaaagggtatgatgtgattgctcaagctcagtcaggtactggcaagacagccacatttgctatttccatcctgcaacagttggagattgagttcaaggagacccaagcactagtattggcccccaccagagaactggctcaacagatccaaaaggtaattttggctcttggagattatatgggagcaacttgtcatgcttgcattggaggaacaaatgttcgaaatgaaatgcagaagttgcaggctgaagcccctcacattgttgttggtactccagggagagtgtttgatatgctaaacagaagatacctttctccaaaatggatcaaaatgttcgttttggacgaagcagatgaaatgttgagccgagggtttaaggatcagatctatgagagggtccagaaattaaatacaagcattcaggttgtgttgctttctgccacaatgccaactgatgtgctagaagtgaccaagaaattcatgagagatccaattcgaattctggtgaagaaggaagaattgacccttgaaggaattaaacaattttatattaatgttgagcgagaggagtggaagctggacactctttgtgacttgtatgagactttgactatcacacaagcagttatttttctcaatacaaggcgcaaggtggactggctcacggagaaaatgcaggccatttacttcacagtttctgctctgcatggtgacatggaccagaaggaaagagatgtcatcatgagggaattccgatcagggtcaagccgtgttctgatcactactgacttgttggcccgtgggattgacgtgcaacaagtgtccttggttataaactacgatctacctaccaatcgtgaaaactatattcacagaattggcagagggggtcgatttgggaggaaaggtgtggctataaactttgttactgaagaagacaagaggattcttcgtcacattgagactttctacaatactacagtggaggaaatgcccatgaatggggctgacctaatttaatccctgggatgagatagttttgaatgcagtgctcgctgttgctgaataggcgatcacaacgtgcattgtgcttccttgagaatatttgaatcttgtctcaatgctcataacggatcacaaatacagattctgatagcaaagcgactttagtcctgagctcttgtgaggaaaggcattggctttatcctctttagagttagactgttgggggtgggtataaaagatggggtctgtaaaatctttttttcttagaaatcatttactagttatgtagaaatggttgtattagatgttctctatcatttaataatatacttgtggactaaaagatataagtgctgtataaaatcagccaattatgttaaactggcatatctgcctttattgtgtttgtcattagcctgactagagaggcctttaaagtgatttcttttttttagagaaaatttgaatgcattttgttggtattgtatttattcaataaagtatttaattagtgctaagtgtgaactggaccctgttgctaagcctcagcaagcaatcatcctaggtagggttaaacccccagtaaaattgccatattgcacatgtcttaatgaagtttgaatgttaaataaaattgtatattcacttt

SEQ ID NO: 23 - DNA, 1542 bp, Mus musculus
accagccagggcttcaagctggtctccggtgactcctagtccttagttttgatacccacccttgcgagagcttttagcgtggcgggtccccggcgtttggggtccggggtgtgtgtggttgtctagcctgcagccggggtcctcggcgcgctcgcgtcctccgccgctggccagaagagacgcgccccagccctgcggggatggaacggaccgagctgctgaagccccggaccctggcggacctcatccgcatcttacatgagctcttcgcgggggacgaagtcaacgtggaggaggtgcaggctgtactggaagcctacgagagcaatcccgccgagtgggctttgtatgccaaattcgatcaatacaggtatactcgaaatcttgtggatcaaggaaatgggaagtttaatctgatgattctgtgctggggtgaagggcacggcagcagtattcatgatcacacggactcccactgctttctgaagctgctgcaaggaaatctaaaggagacattgtttgactggcctgacaaaaaatccaacgagatgatcaagaagtctgaaagaaccctgagggaaaaccagtgtgcctacattaatgattccattggcttacaccgagtagagaacgtcagccacacagagcctgccgtgagcctccacttgtacagtccacccttcgatacatgccacgcttttgaccagagaacagggcataaaaacaaagtcaccatgacattccacagcaagtttggaatcaggactccatttacaacttcagggtcactggagaacaactagggcccaccaagcccttggaagtttcgctttctgatcctctgaatgttttcccttggacagagaggccacccaccatttgctgtccagttacacagttaaacaaaggctatgctcagttctactgcaaagggtgtgtcctaaggaagcaaacaataccctgagctatgcaggtggaaaatcctactaaagaaaaagtcacttgatttttttaaattaggtatttacttcatttacatttcaaatgctatcctgaaaagtttaagtttttaaggaccaggttcttttgtcctctaactctattgggggtgggggagaggttgtccatggaaactctacttgggcttctggtgggtttttttcagccttaggaaacactctggtctctgaactctaataatcaataagtaaaaataagaaacctcaaactatcacgtgtctgttttcatacctggaagtctcaatgtggaaatccttaatatactttgtatgttcttaatatttgacaagaattttttttttcaaccctatttgacaaattcctatgctgtggagactagggacgcatagagcagtttggtgcttggtagtgaccagcagggggttagagatgtgcgtgaacccagacctcccgcaaacaaaaactgagactcgtgtgtaatgtgtgccaccaccttgagctgccaccaaaattgccaaacaactttaataaaactggatttgaaaagaaaaaaaaaaaaaa

SEQ ID NO: 24 - DNA, 3107 bp, Mus musculus
gatctagtagaaggtgcacggttgggaagacagttgtggggcacaccccaccctgagggcactccgggtccaggaacttccgagcgggggaacctgatttgagatcaattcttggagaacacaaagaagtgtggtggtatgttccaggattgaaccagctgccctttgaccctgccaacaacaacgaacccctgcagtttggtagtgccagtggccctctggttccagaaggcctcattgagaatggaggggaatcaagcaagaaaagaaagagaacaaatcctccttcagctgataatactagaactctgaatgtagattctgctgcaatgacgctgcctgtgtctgatccagctgcatgggccacagcaatgaataatcttggaatggctccactgggaattgctggacaaccaattttacctgacttcgatcctgcccttgggatgatgactggaataccaccaataactcccatgatgccgggtttgggcatagtcccgccaccgattcctccagatatgccggtagcaaaggagatcatacactgcaaaagctgcacgctcttccctcccaacccaaatcttccaccacctgcaacacgagaaaggccaccaggctgtaagacagtgtttgtgggtggcctgcctgaaaatgggacagagcagatcattgtggaagtgtttgaacagtgtggagagattattgctatccggaagagcaaaaagaacttctgtcacattcgctttgctgaggaatacatggtggacaaagccctctatctgtctggttaccgaattcgtctgggctctagtactgacaagaaggacacaggccggctccatgttgactttgcccaggctcgggatgacttatatgagtgggagtgtaaacagcgtatgctagccagagaggagcggcaccgtagaaggatggaagaagaaagaatgcgtccaccatccccacctccagtggtccactattcagatcatgaatgcagcattgttgctgaaaaactcaaagatgattccaaattctcggaagctgtgcagaccttgctcacctggattgagaggggggaagtgaaccgccgcagtgccaaccacttctactccatgatccagtcagccaacagccatgtccgccgcctggtaaatgagaaagctacccatgagaaagagatggaagaagcaaaagagaagttcaagcaggccctttctggaattctcattcaatttgagcagatagtagctgtgtaccattccgcttccaaacagaaggcatgggaccacttcacaaaagcacaacgtaaaaacatcagtgtttggtgcaaacaagctgaggaaattcgcaacattcataatgatgaattaatgggaatcagaagagaagaagaaatggaaatgtctgatgatgaaatagaagagacaacagaaacaaaagaaacggaggaatcagccttagtgtcacaggcagaagctctgaaggaggaaaatgatagcctccgctggcagctggacgcataccggaatgaggtagaactgctcaaacaggaacaaggcaaagcccacagggaggatgacccaaacaaggaacagcagctgaaacttctgcagcaagccctacaagggatgcaacagcatctgctcaaagtccaagaggaatacaaaaagaaagaagctgagcttgaccgaatcaaagacgacaatttacaggtagaacaactgttggaaaattttcatgaaaagcaggaaaactgtggttctaggctgtgtgcatcaagccaagaaggtgagcaacctcttgagaagaccgcagtcagcaatcctgtcaaatctgaacgtgaggcactgctagtggggatcatctccacattccttcacgtccacccatttggagccagcattgaatacatctgttcctacttgaatcgtctcgataataaggcaagctaccaaatacccagcaaattaaccacttctccactcttaccgatcagcaccagtgatgtggaatctctcatgagtagactccagcataccttcagacaggaaatgactggagttggagccagcctggagaagagatggaaattctgtggttttgagggcttgaagctaacctgaagctctttgcctagaattagagatcctgaaaataaatgtgtgcttgacaagcttaggatgtgagttttgtcctcagtggttttcaagtggacattgctttcaatttgtcagttcattcctgaatctctttcaagttaaaataaggatcctagaatagcgtctcaagctacaggtcctaaaaagaaattgcctcaaacctcaagtgctgtaactttctcctatttctggcaattggttgacttgtcttataagtaatagtgaaaaattcctgagactaaagcgtattggagtgttttcagtgtctgtactactgctgtagaccttgtactttttcaacgctgttagctgcagtgttttgatggtttgtatgtgctctgtgtttccagatttctcttcacgggttgctactggtaaaaggagtgagagggatgctaggaaccccctgtaactgccattgtctttctcatctacagtaaacactaaaggaataacccatctgtgtcttctccaaggtgcttcaccagttcacctttgaaataaaaaagcatgaactgtggctttttgtaaaaatactgtgaaccaaaagttgacaaacgttccaaagttattttctctaatagataaaaggtctatttcagaattttaaaacaggaaatctagatggattcatgggaagtctccagtatgactactgtgtttgtgcttttcagaactacttgtaaatagtctgctttacaaagagggcatgtttagttttctatgaattaaaatgcagtcaggtgtgggcacatgtgcacacacattggcagaagggatttattttgatagtcctttcctctggccttcctactgtctgttggtcccattttttcctgctgttagtgtgctgaaatgcaaactgtgtattgctgtaaatactgtttacttcaatgctggatgtttgtaaagaactgatgtgagtattgaaagtaaagaaataat

SEQ ID NO: 25 - DNA, 2855 bp, Mus musculus
ccggggagagctggcactgcacaatgggcgcctgggggactcacccagccctcaggtgctagaattcgccgagttcattgacagcctcttcaacctggacagcaagagcagctccttccaggacctctactgcatgatggtgcctgagagccccactagtgactacactgagggccccaagtcccccagccaacaggaaatcttgcttcgggctcagtttgagcccaacctggtacccaagccccccaggctctttgcaggatctgctgaaccctcctctggcatctcgctctcaccctccttcccactcagctcctcgggggagctcatggacctgacccccacgggcctcagcagccaggagtgtctggccacagacaagatccggacttccacccccacaggccacggggccagccccaccaagcaggatgacctggtcatctcggcacgctagcacttggcagtggccaccagctccttcccagccagagctcaaggccttgtgggtacctaacaaccactcagggcccagtagctttggggagaggctcccagaggccaaatggtctcaggccctggagcattgctgctgaacagggggtccgcatccctacctcagcctaggacccccagaaccaagatgtctgggaaaagcaggggtggctttggtaacagggaggagatgtcaggttggatggtcctcagccctcagcctgactcctctgtatgggcggcatgacgtctctgttctgggtctggcactaggcaagctagcttcctgtcactgccctccagctactctcccagagccgcggcagaaagcagccccacccccaccctcactcccacatattctcacacgtagttcaagttggcaccttgccctggccactctccccccagatctggtgcctgctggccagccccctggggtgacccccaccaaggtggcccgcagtgctgtatgtgtttacagaatctgctgggcttggctcaggttgtgtcctgggttcgtaagccccaactcccagtcatgtatttagttgtcctcccttctgagtgggacctaaggaccagaggggccccgaagggaggtggggtcagggatgccccttctttgcctggtgccccttatcttcatgggtcctggccactgggcctgactacctacctgccactccctggcttcctggctcgccttctacccccaggactctggccattcaaagggtggtggacactcctgtgacctcacccctggctgcagagtcagggccctgggaagaaagaaggcatccaaaaccctgtctctttggtgtcccgcctgaccccttctatcaccccaccatgcctaggcagctctgggccctggggtctgaaaccaaacatgcctctgcccacttgctctcctggatgcctagctcctttctgggtctgggctccaactcccactgtgtccagcccataagatgaggggccaaaagtagagtattctgggacctggctggaaacccccgcccattgccaacgggaggggccggggactcaggggctgtcccaggttagcctgaggccttcataggttttcctatgctttggagaagcagttcaggaggtaggaacccagccctttccccaggctggggggagggggaggggggaggttgtgcatggtagtgtcaggtgtgtgtgtgcatgtgcatgaatgtgcacaactcctgaggaaaggggctgcagagggctgcctgccttctgcacgttgcctgcctcctgctcctcctaacctgccaagaatatagcctgtgaagtgaagccttgggataagccagccactggggtgtgcaggcaagcagctgcccacccttgtgcccttgtctccttggaagcatggtcccttccactctagccccactcccagcctctctgggctgcctaggtttccctgaccaactcatgattcctggcatctgggcctgagtctttactctaaccccacagctgaggtggcctggatagctagctatctgccctaacaggtaaggacagagacctgggagctgggcctccccctgactctgtgactcccccaccccacaacagactcctggtcaccctgccccctgccgaggcagtgcctcagcctagcacagaagataaaaatcactggttcttagaactcaaatattagacaaaaatcttcaatcagaggagtaacccagtaagtaccccagccggcacaaggagagttgtgggtctggccttttatctcttttcctctgtcagggtgggtctgggggggggtccttctagggtgtgcccctatgcccgggactgagccatcagggacataccccccacccccaaggctgcagccatactgtgttacaggcttggggctggggcaggcttggactcagccctggacacgaagggccagcccacccctccctgcctgaccctagaagggtgggcatgatgcacgtccccttcactccatgccacatctggggggtctgagccaccccctccgttccagttcagattgacaccccacacacacactgtccccagacccgcagcacaagctctcccagccatgcgctggcctgtcctcccagggagctgggcgacttccatatgcaactagtagcgaacagccaggctcccatgaaccctctgcactccacgtgccattctcccatgacctttttgtacctaatgtatgaaagatccacactaatatcgctgtaaaaagaagagacaaattaatatagcttattctatgaatatatctgtatataaagttttctgtatattgtatagagctgtgtataaactgaatgtagaagccc

SEQ ID NO: 26 - DNA, 4054 bp, Mus musculus
gtagatggcagcggcagcggcggcgcgggccaaggagaccaggcggatgccgccatgcagcactatggggtgaatggctactccctgcacgctatgaactcactcagcgccatgtacaacctgcaccagcaggcagcccagcaggcccagcacgcccccgactaccggccatcagtgcatgcgcttacgttggctgagcgcctagctggctgtacatttcaagacatcatcttggaggcccgctatggctcccagcaccgtaaacaacgtcggagtcgcacggcgttcacggcccagcagcttgaggccctggagaagaccttccaaaagactcattacccagatgtggtgatgcgcgagaggctggccatgtgtaccaatcttcctgaggcccgtgtacaggtgtggtttaagaaccgcagggccaagttccgaaagaagcagcgcagcctgcagaaagagcagctccagaaacagaaggaggccgagggttcccacggagaaggcaaggtggaggccccagcctcagacacgcagctggaaacagaacagcctcctggtttgcccagtggtgatcctcctgctgaacttcaactgagcctgtcggagcagtcagccagcgagtctgccccagaagatcagctggaccgtgaagaggactcccgtgccgaggagcccaaagctgaaaagagccctggatctgagagcaaggtgccgggctgcaagaggggcagccctaaggcagattccccaggcagcctggccataacgcccgcagccccagggggcggcctccttggtccttcccactcctactcctcatccccactcagcctcttccgtctgcaggagcagttccgccagcatatggcggccaccaacaacctgatgcactactcgtcttttgaagtgggcggtcccgcacctgcggcggctgcagctgcggcggctgccgtgccctacctaggggtcaacatggccccattgagctccctacactgccagtcctattaccaatccctgtcagcagctgctgctgcccaccagggtgtgtgggggtccccattgctgccggcgccccccacaggcctggcacctgcctccgctgccctgaacagtaaaaccacgagcattgaaaaccttcgcctccgggccaagcagcacgccgcatccctgggactcgatacactccccaattgactgtctggcttctaacccaaccatggtcttgggtgtacccctgtctcggtcccatggttattctcagaaggctctccaagttctcctagaactaactttgagagcccagggatgctggggcctggagtcctttcaccttgtctcccttattcaaagtcccaatcccaagtgaaacccacacaccctctgcatggccctgcttggaccccatggaggtcaaatggggaggaggggagcaactggctacaccccctcttcagtattgcctcctccctcctgctccccccccccccgttagtaagttgaagtgtggaatgtgagatataaatataaatatataaaactatattttcaggcactgcctgccccaggccccctttccctgttctcacatcgccactacccttgcccctgagattcactccagcagattctctctctctctctctctctctctctctctctctctctctctcatcctcctttttctcctgatcccccctcccctgcagccccactgcctctgtcttgatccctgtccctctacctacccttggcctttggtgctggctttattattgtccagtattctcaaacagtgtttcttttgggggttgtaggttttttttttgtttttgtttttgttgttgttttttgttttggttttagtcattttgtttcttcctgtttctcttctgctccgcttggctatctcctcccttaacctgaactctctctaggcaactcttccattccatgccccaagattcatcaaagtcctacttggagacccaggagcaacaggcaggaggtagctctaaccccacagcatctccagatattaggaggggctcacagtcaccttttcttctctttctttgcttggaagtacccgctcccagattgcagaggggcagccgcagtagaacagagacctcattgcagggttctagaatcccttctcagtgagtgaacccttatggctacatacggtctcaggacttggcttcctgttgcagaggccggtgtgggagtaggcgcttctgtctcgttagtcactggcatggcagggtgtgttcttctatgtctaggcaaccctgctctgtggacgccctttcaagcttgctaggactgtcttgtctggataagatgatttagaagattctgtccatttccaaccacccagtgttctatgccacaaccttgtatggcagaggctttaattaagtttaataataataactgcagcataagcacttagagaagcccagtttgtaagttagaacattactgttgttttgctgaggaacagtgagtcctgcatacctgaagatctctgtggatactgcctctgtttcccagtaaatgtaaatggctcctttttaggttagacaatctggatttgatcctatttttcttggattccagtgtgagccttgggggggggggctactccattcccctgcccatggtgaggggtgggcaagattacttgaatagattcgtggttatgattccgcaaccctttggctcgccacagaaccctcaaccccacgcccacacagtggtggcctggcacgactggcctacagagccaatagtgctcaccttagtaatgtcagtctggactggggtaggagaaggttttagccagtaaaaagtgagacaggaaagcatgaaagaaagaaacaggagaagtgagccacggaacacaaggtgactggcctcgtgagaggtgaggcagagagcctaggacgcagtctcacattcccactttcacgcagcagcaccaaagtcagttgagggtttcttaagaaggggtatcttcctgggttctagaatctgcgaacatcagaggaggagagacttggacggggagatgagaggttagcaaatccttagggagatgagggggttctgggttagggagggatcagtgatcgatccatggttaccctattgtggtcagcttcaagaaattatgtttctgtattgtctcatctggaaccaggcgcagggctgaaactgtctttctattcctgggtgcaaatgactgattgtcactgggacttgggatctaacacttctgggtattaccatttccagaagccttcccaacctcctaaagagcaaggccacctgaggtcatatctggtcatgacatgagcctggtctatcccaggcttttctaaactctcttagatctttgtcatgtgttctctcatgtgctgacccaaatccccaaggccagagaagggagggaagacacacgtgggttttatcttcatgaccatgtcttcttaggaggattagagggcacgattctttgaagaaattgtgggtgagcccaccttcctgacactgctgatggaatctctctcaggcctgctggtcacttagggcagagagcccaaggattaaacccttacaagcccttctaggaagagtcctgtatgtctctgctctgtttgaggtctcctttgccctgcttcctcatttccctagagcatggttcaggggcctgggtccccatttctatgcagaggctgactggctgtatagactgcttttcaaaccagctgttttgtgaccacttgtgcttagaggttgtacaaagccttggcaaaaaacaaaacaccgtgtattgtatttatttattctgttagttgatgaagcaaaactcaaacctctcactttccctcgtcctgtcccctgcgtagcacagcatgaatctctgtcctgtatatctgtcagtcttttggccttacttcctgtgactttgtgacctgttcgttgtcttaattggctaataaaagagaacctggcagcacaaaaaaaaaaaaaaaaaaaaaaa

SEQ ID NO: 27 - DNA, 2309 bp, Mus musculus
ggttacagagcggagagagtgaggaggctgcgtctggctcccgctctcacagccattgcagtacattgagctccatagagacagcgccggggcaagcgcgagccggacgggcactgggcgactctgtgcctcgcggaggaaaatcaactaaacatgggcaaaggagatcctaaaaagccgagaggcaaaatgtcctcatatgcattctttgtgcaaacttgccgggaggagcacaagaagaagcacccggatgcttctgtcaacttctcagagttctccaagaagtgctcagagaggtggaagaccatgtctgctaaagaaaaggggaaatttgaagatatggcaaaggctgacaaggctcgttatgaaagagaaatgaaaacctacatcccccccaaaggggagaccaaaaagaagttcaaggaccccaatgcacccaagaggcctccttcggccttcttcttgttctgttctgagtaccgccccaaaatcaaaggcgagcatcctggcttatccattggtgatgttgcaaagaaactaggagagatgtggaacaacactgcagcagatgacaagcagccctatgagaagaaagctgccaagctgaaggagaagtatgagaaggatattgctgcctacagagctaaaggaaaacctgatgcagcgaaaaagggggtggtcaaggctgaaaagagcaagaaaaagaaggaagaggaagatgatgaggaggatgaagaggatgaggaagaggaggaagaagaggaagacgaagatgaagaagaagatgatgatgatgaataagttggttctagcgcagtttttttttcttgtctataaagcatttaacccccctgtacacaactcactccttttaaagaaaaaaattgaaatgtaaggctgtgtaagatttgtttttaaactgtacagtgtctttttttgtatagttaacacactaccgaatgtgtctttagatagccctgtcctggtggtattttcaatagccactaaccttgcctggtacagtctgggggttgtaaattggcatggaaatttaaagcaggttcttgttggtgcacagcacaaattagttatatatggggacagtagtttggttttttgttttttttttttttttcttttggttttctttttgggttttatttttttcatcttcagttgtctctgatgcagcttatacgaagataattgttgttctgttaactgaataccactctgtaattgcaaaaaaaaaattgcggctgttttgttgacattctgaatgcttctaagtaaatacaattttttttattagtattgttgtccttttcataggtctgaaagttttcttctcaaggggaagctagtcttttgctttgcccattttgggtcacatggattattagtgtgttatctttcatctagttagctggaagagagcttttgtccacatgccctgccattgtggtagggtaacattttcatccatagttgaagaatctcctaaatcgtgatagttggataagagatattatataacctacttggcaaagcaaggagtgatcaatactgtcacaccgtgggactattaggatcaagcaatctgaacgtctgtccttgaaggactgatagaaaagtaccttctaatccttacacgaggactctcctttaaccgccattactgtgtaatgacagttatattttgcagtttcccctactaaagaagacctgagaatgtatccccaaaagtgtgagcttaaaatacaagactgctgtactatttgttgaccttagtcccagcgaaggctatcacaagaacgctggctgtaaagcctttgcccttctatctagatatggattgctcaggaaacttgactgtttaaaggtatttttaattacttgagccagcttttaaaattatgccacatttaaaatgaagggtatattttcctatactgtggtttgtccctttatgaatcagatacaagaggataaactttgcatattagtaccatttgtccaatacatttgctttttctttataaaacccaaactcattcattaatcaggtttaatctgcttagtttagggaacaatttggcaattttgtggatttttttttgagattatcgttctcttaaagtgccagtgttttaaatagcgttcttgtaatttcacgcgcttttgtgatggagtgctgttatataattttgacttgggttctttacatttgcgttgttaatgtaatttgaggaggaatactgaacatgagtcctggatgatactaataaactaataattacagaggtttt

SEQ ID NO: 28 - DNA, 842 bp, Mus musculus
ggagggaggtacaggggagaaccgcaggcccagcctgtacccctcaacccagacctagggaacctgggcttccaaggcatttgcagcagaacctggtgtagctgactgcatagaccctggagccccttcacttgggaatgagctggaaggtgacaacccaactgaaatcacatcacgcagctgctgtggtacaatgtgacaggtgacatgtcgcatcttcaggacctcagtctcccccatttccaccccagaggaccagagatggcctgccatctaggacccacccatgaaagaaccagaacaaatgaagaagtggagtgagaaatgttcctgggaagaaaaacctggaatgtacagctactgaagaggaacccaaagcttaatcacagactcctaacatcaaaataaagggaaccagatagcagcattaaaaatctcactcgccacacagggcggtattcaccagcaatcttagcattttggagatggaacctggaggatcgggagttaaaactcatctccagatacataatgggttctaggctacctgagactctgtttcaaataataaacaagtctcccccataccagaaggcttatcaatcctgtttccagaaccaattccttgccatgcatcaaaagcatgatcaggcagggccagcaagatggttctctgggtaaagtacttatgacctaggttagatccctggaatacagataaaggtttccataaagacaatggattctgtaaagttgtcctctgaccttccaatgatccttcattggcaatatatacacacgtgtatacacaatgataaataaataattttaaagttgtacct

SEQ ID NO: 29 - DNA, 3192 bp, Mus musculus
actcggccactctgcggagcaggcatgggagccgcgcgcgtcctccgggcgcccacacctgtctgagcggcgcacggccgcggccccggcgggctgctccacgcggtagcactcagcatggctggaatcccggggctcttcatccttcttgtcctgctctgtgtgttcatgcaggtgagtccctacaccgttccgtggaaacccacatggccggcttatcgcctccctgtagtcttgcctcagtctaccctcaacttagctaaggcagacttcgacgccaaagcgaaattggaggtgtcctcctcatgtggacctcagtgtcacaagggaacaccactgcccacctacgaagaggccaagcagtacctttcctatgaaaccctttatgccaatggcagccgcacagagactcgggtgggcatctacatcctcagcaatggtgaaggcagggcacgaggcagagactcggaggccacagggagatctcgcaggaagaggcagatttatggctacgatggcaggtttagcatttttgggaaggacttcctgctcaattatcctttctcaacatcggtgaagttgtctactggctgcactggcaccctggtggcagagaagcacgtcctcactgctgcccactgcatacacgatgggaaaacctatgtgaaagggacacagaaactccgagtgggcttcctgaagcccaagtataaagatggtgccggaggggacaacagctcgagctcagccatgccagacaagatgaagtttcagtggatccgcgtgaaacgcacccatgtgcccaaggggtggatcaagggcaatgccaatgacatcggcatggattatgactacgccctgctggaactcaagaaaccccacaaaagacagttcatgaagattggtgtgagtcctccagcgaagcagctcccagggggcaggatccacttctctggttatgacaatgaccggcccggcaatttggtgtaccgcttctgtgatgtcaaagatgagacctacgaccttctctaccagcagtgtgacgcccagcccggggccagtggttcaggggtctatgtgaggatgtggaagagaccacagcagaaatgggaaagaaaaattatcggcatcttttcagggcaccagtgggtggacatgaatggctctccacaggatttcaacgtggcagttagaatcacgcctcttaaatatgcccagatttgctattggattaaaggaaactacctagattgcagggaggggtgacatgcgtcttcttgccagcaccaatggtctttttgcactcattgtaggagaggctagctttttatcattgactcttgtggtgtgagtcacatagtatcttttacctagtattcttcaaatggcaaaaattattggctatattattttaaaactgttgtgtgcgttatagcatttaagcagtctgaaagcatacttttgcatagagactttaaagtattcgggtaatagggcctatttgacaaggaagttaaactttcagtttttggagaattctaatttttgtctgatccaaacttgcttcagaggtttatatcaaatacgtgacacacagggaatatgaattcttatgtttgtatatgtatatgttttcttctgagagtcatatattgatatttttgtaatgtgtggttattatgcttccagataatgatagcaaagtcttcaataggcaatttataatgttttggattcaaacatttacgtagtagtccttgaagagaacaataatttattggctatattgatacccatataagactgtatcttacagtgcacagaattcccacgctgcttttagttttgaaaataaaactttcccttgtaaaaactgctgttctgcttttgtgggacgtctgtatacagttctgcaaagcttgctatcacaccagagtgggcaagaccattaattccaatcctcctcttggcaaggttttattcgcatgtctgaagctaacagtttctcgaaagacagtaagtggagcctaattagaacaggctgaaaagcttcccagctagcacttgtggctacaataaaaaacaattcttggattttctccccacagtgaggcacatctcacagtttatcatttggatgagtaatttaaaatgaattaaattccagagaacaatggatgcactgctccatagatgtcactgcagagtaaccacttgtttgaagcctagcataatcgcacagcctaatccagatttattctgcttagtttttcaacgtttccagagagctttacatttgtttagttggtaaacttttctctctcactgcacttattctatagtttaaaaaaaaagtttgaaagtagctttaggaaaaccagtatagctttattttcccgacttcaaagtggcatctcgtgctggaatggtctaggctataggaacataaaaccagacatagcagtcagaaaaacaactggaggtggtgggtgagatggcccagcaggcaaggatatttgctgccaagcctgccagcctgagtgcaattcgtgggacccaaatgtggaagaggagaactgactcccacaggttgacctctgacctccactggcacaccagtgcaatcccataaatacacaaatgtaatttcaaaatcagagggctggagaatggctaagtagtgaagaatgtttgctgaggaaacatgtggactgagattcaattcctcctggaacataagatgaacagacatgtaatcccagtactatcagggacaaagataggaggactgatggtccttgctggcttctggcccaactccaagttcagagagagactttgctacagaggaataaggcagagaataataaagcagaacactggatgtcctcctctggcaatacacacacacacacacacacacacccagacacactacataaaataattcaaacaatgggggagaatacaaaaactaacaagaatcatacattttagtaaatgttatgtaaacagaatcacagcattagggagaaattactgacttattttgtagtttcatcttgtgactcttagtctaaatctatcagcgaggagacaagcaacatgaggtcgatgtttgaggggttgcatgctgggtaattttagcttacattgtagctctaagaacattcaaatataacactgtcaatt

SEQ ID NO: 30 - DNA, 8145 bp, Mus musculus
gaacgagagcgctgtgcagcttggagctcttcggtcgcattggccacatgtgcccggcttcagcgggcgcgcctgcagctctgtggcctgcggggctcggcggcggggcctgcccccggttggggggtggggggcggggagaggatcgtggctttttcccgcctggcgcgataatggagtgaaaatgacccggtggcgttagcggcgcgcgtagggtcggggcgccggagcaggcgtgcgcggaggggggtgggaggcggctgtatttttagccagatgcctcgtaagttgcccgcgcgccccgcgccgcccagcagataacaccgagggagctccggtgtcagcgagcgccgggcgatggcagagcggccgcgcaggtcggggtcagaccccgcggccgatgctgctaccagctttctgcgggcggcacgctcggggaacctggacaaggctctggatcacctgcgcaatggagtggacattaacacctgtaaccagaacgggttgaacggcctgcatctggcctccaaagaaggccatgtgaagatggtggttgaacttctgcacaaagagatcattctagaaacaacaaccaagaaggggaacactgctctgcacatcgctgcccttgctggtcaggatgaggtggtccgggagctggtcaactatggagccaatgtcaatgcccagtctcagaaaggctttactcccctgtacatggctgctcaggagaaccacttggaagtggtgaaatttctactggagaatggagccaatcagaatgtagccacagaagatggcttcaccccactggccgtggctctacagcagggtcacgagaatgtggtggctcacctcatcaactatgggacgaaagggaaagtgcgcctccctgccctgcacatcgcggcccgcaacgatgacacacggacagccgcagtccttctgcagaatgaccccaacccagatgtgctttccaagacgggattcacacccctccacatcgcagctcactacgagaacctcaacgtggcccagttgctcctcaacaggggagccagcgtcaacttcacacctcagaatggcatcaccccactacacatcgcctcccgcagggggaacgtgatcatggtgagactcctgctggaccgaggggctcagatagaaacgaggaccaaggatgaattgacaccgctccactgtgcagctcggaatggacacgtgagaatctcagagatcctgctggaccacggggcacccatccaagccaaaaccaagaatggcttgtccccaatccacatggccgctcagggagaccacctcgactgtgtccgacttctattgcaatacaatgcagagatagacgacatcaccttggatcacctgactcctctccatgtggcagcccactgtggccaccaccgggtggctaaggttcttttggataaaggggccaagcccaactccagagccctgaatggttttaccccgttacacatcgcctgcaagaagaaccacatccgtgtaatggagttgctgctgaagacaggagcctccatcgacgcggtcactgagtctggcctgacacctctccacgtagcctccttcatgggacaccttcctattgtgaagaacttactgcagcggggagcgtcacccaatgtctccaatgtgaaagtagaaacccccttgcacatggcagcccgagcagggcatacagaagtggccaaatatttgctccagaacaaagccaaagccaacgccaaggccaaggatgaccagacaccgcttcactgtgctgctcgaatcggccacacaggcatggtgaagctcctgctggagaatggtgccagccccaatctggctaccactgctggccacacacccctacacaccgcagcccgtgagggacacgtggacacagccctggccctgctggagaaggaggcatcccaagcctgcatgaccaagaaaggatttacccctctgcacgtggctgctaagtacgggaaggtacggttggcggagctgctgctggaacacgatgcacaccccaatgcagctgggaagaacggcttgactcctctgcatgtggccgtccatcacaacaacctggacattgtcaaacttcttcttccccgaggtggctccccccacagccctgcctggaatggctacactcctttgcacatcgctgccaagcagaaccagatagaggtggcccgcagtctactgcagtacggagggtcagcgaatgcagagtcggtacaaggcgtgaccccacttcacctggctgcccaagagggccacacagaaatggttgctcttctcctgtccaagcaagccaacggcaacctggggaacaagagtggactcactcccctccacctggtgtcacaagaaggccatgttccagtggcagacgtgctgatcaaacatggcgtcaccgtggatgctaccacccggatgggttacaccccgctccatgtggccagtcattatggaaacatcaagctggtgaagttcttgctacagcaccaggcagatgtcaatgccaagaccaagctaggatacagccccttgcaccaggcagctcaacaaggacacacagacattgtgacattgctcctgaagaatggtgcttctccaaatgaggtcagctcgaacggaaccacacctctggcaatagccaaacgtttgggctacatctctgtaacagacgtgctcaaggtggtcacagatgaaaccagtgtggtgttagtcagtgacaaacaccggatgagctaccctgagacggtggacgagatcctggacgtgtctgaagatgaaggaactgctcacatatctataatgggtgacgaacttgtcggctcgaaggctgaaaggcgggactcccgggatgtgggtgaggagaaagagctgttggattttgtgccgaagctagaccaagtggtggagtctccagccatcccaaggatcccttgtgtcacacctgagaccgttgtgatccgatctgaagatcaggaacaagcatctaaagaatatgatgaggattccctcattcccagcagcccggccacagagacctcagacaacattagccctgtggctagcccggtccacacagggttcctggtgagcttcatggtggatgcccgagggggatccatgagaggaagccgtcataatggcctcagggtggtgatccctccccggacatgcgcagcacccactcgcatcacctgccgcctcgttaagccgcagaagctgaacacgccacccccactggctgaggaagagggcctagccagcaggatcattgccctgggacccacgggggcccagttccttagccctgtgatcgtggaaatcccccattttgcctcccatggccgtggggaccgtgagctggtggttctgaggagtgaaaacggctctgtgtggaaggagcacaagagtcgttatggggaaagctacctggaccagatccttaatggcatggatgaagagctggggagcctggaggagctggagaagaaacgtgtgtgccgcatcatcaccaccgacttccctctgtactttgtcatcatgtcccggctctgccaggactacgacaccatcggtcctgaagggggttccctgagaagcaagctggtaccgctggtacaggcaacgttccctgaaaacgctgtgaccaacaaagtgaagctggctctgcaggcccagcctgtcccggatgagctggtgaccaagctcctgggtaaccaggccacattcagccccattgtgaccgtggagccgaggcgtcggaagttccaccgtcccatcgggctgcgaatcccgctccctccctcatggacggacaaccccagggacagtggggagggagacaccaccagcctgcgcctactgtgtagcgtcatcggtggaactgaccaagcccagtgggaagatataacgggaacaaccaaacttatatacgccaatgagtgtgccaactttaccaccaatgtctcagccaggttctggctgtcagactgtccccggactgcggaggctgtgcactttgccactctcctgtacaaagagctcacagcagtcccctacatggctaagtttgtcatttttgccaagatgaacgacgctcgggaaggacggctccgttgctactgcatgacggatgacaaagtggacaagaccctggagcagcatgaaaacttcgtggaggtggcccggagcagggacatagaggttctggaagggatgcctctgtttgcagaactctctgggaacttggttcctgtcaagaaagcggcccaacagcggagcttccatttccagtcgtttcgagagaatcgtctggccatccccgtgaaggtgagggacagcagccgcgagccaggagggttcttgtcgttcctacgaaagacaatgaagtacgaggacacacagcacatcctctgtcacctgaatatcaccatgcccccctgcaccaagggcagtggagcagaagacaggagaaggaccctgacacccctgacccttcgatacagcattctcagcgagtcgcggctgggttttaccagtgacacagaccgtgtcgaaatgaggatggctgtcatcagagaacacctcggcctaagctgggcagagctggcccgggagctgcagttcagcgtggaagacatcaaccggatccgtgtagaaaaccctaactccttgttggaccagagtacagccttgctgaccctctgggtggaccgtgaaggcgaaaatgcaaagatggagaatttgtacacagccctgcggaacatcgacaggagtgagattgttaacatgttggaggtctccggcaggcagagcagaaacctcaaaccagagcggagacatggggaccgggagtactcattgtcaccctcccaggtgaatggttactcctcgctgcaggacgagctgctgtcccccgcctccctgcagtacgctctcccctctccactgtgtgcagaccagtactggaacgaagtgaccgtcatagacgccatccccctggcggctacagagcatgacaccatgctggagatgtctgacatgcaggtgtggtctgcgggcctcacaccctccctggtcactgctgaggactcctctctggagtgcagcaaggctgaggactctgacgccataccagagtggaagttggaaggggcacactcagaggacacgcagggcccggagctgggctctcaggacctggtggaggacgacacagtggattcagatgccacaaatggcctggcagatttgctaggccagcagcgagttcacgcccgaatcacagactcaccctcagtgaggcaggtgctggacagaagccaggccagaacactggactgggataaacagggttccacagcggtacacccgcaagaagccacacagagctcctggcaagaggaggtcacgcagggcccacactcattccagagaaggatcaccaccatccaagggccggagcctggtgcgcttcaggaatacgagcaggtgctggtgtctaccagggagcatgtgcagagggggccacctgagaccggcagccccaaagctggcaaggaacctagcctgtgggcacctgagagcgccttctctcaagaggtgcagggggatgagcttcagaatattccaggagagcaggtgacggaggaacaattcacagatgaacagggcaacattgttaccaagaagatcattcgcaaagtcgtccggcaggtagactcgtctggtgccatcgacacccagcagcacgaggaggtggagctaagagggagtggactccagccggacctgatagagggcaggaagggggctcagatagtgaagcgggccagcctgaaaaggggcaagcagtgacctctcctcaagtagccccttgggaggatcacacctcaacacccaaaccctgaactccacacactctgtcatgcacacgggaagagacctggaccagagggctactgaagggtcgcacgtgttctgagctccccggcatgacctctgtaaggagtttcctttagtctcctattcgcatgaatgactggctgtagacgcatgacctacagtcttcagtcctgcctctagcgactatggatctctgtgggaatcaggacaaaggcctcgagagaagggagagaagaagggagaggatagcaagccccaaagagcacacgggtgcagacacgaataataagggctttactgtggccgggatggttgatctgtttgtttgctttttgttttgattttttgacttcaacctcatttgtaagaaatacacataatctttctggaccgaggaaaccgggaacggcgtgaaatcagtttagcccattgtcctacatcctcgttgtacctgcacacgccacatgccacttgtaacaccccaccccaccccaccccaccctaccccccagcccccatgaagggactgctcttctcagaatgacatgacacaggtgcacatgcgcaggcctccccttcactcagtctacactggttttactgtgacctttgacgacgctgtatggataaactggatttattattttttttatgttgtctctcagtttcagtattactcatcttccagtgggaaatcatcaccttgagagtgcattcggggttccttgtgttagaaatttaagatctgaggaaggaccccctaggctttgctgtagggctcagagggagccagggtcccatctcaaagttctcggcttgggaagggcctgtggctgtccgaggattgcaccagcatgttcaatagaggaagaggttttctaaatcgtcacgtacttctataatagtctgtgttcaaagtgtaaactgtacagtaatcagccttgtgtatatgaaaacaataaatactatgcaaaccaatagaaacacgttagcagtatgtacaaagccctaaagagctcagctcctgaggacttctccaggctgtgggaggagctaaaggctgtctttcaccgaaagaggaagggagtagggctgtgaatgtacctgccagttcctaggtcagaccatcctgaggtcttccagagccaacttggtgcttgaagtgcaggtggccgcaggctggaggtcctggcacagacaactgggctcgggctggtcggccaagtgcctggctctgaccacgggcccagcgcaaggagagccggagcaggatggagctgctgaccaggaggctgaggagagaccctcttctatctagactcagggccaggccaggaaggggaccctcaactggctggtcttgccttggagccctcagggaagagccttaacgtcacactagagtctcctgcagagggaggcccgaatcagcacaatccggctccgccatgcccgggcggcgccccctagggccaggagagagactggcaggctcttctcgctctcccagagccactggtggacggcggtcaccttcctcgcctgccgctcctcggggtgtcgtcgggacacaataaaaaccttccaagtagcacagacgccccttcatgcccgtacccccacgccctggaggccctcccggggactccagcccgcgcgcgctctagccccgggccagtgcgcgggttgggggatgctgtggtccacgggcgcggctagctttcctgggggtagggaggaggggcggcggccccgggagggcgggcgagcacgggcgcggggtcgccccgcctcgccccgcaccctccgcccagtagcggctcttagcgccctgcgcggcccgactccgctttggcaccctccgctcggtctggcttggctgcttggcacgccgcccccccgccctcggcggcatgcgtgcgcgctcccgttgctagtaggagctgttttaggaggagtttggggtctccacttgatgcctagagaatgctgcagtctgcaccttagacgctttttagaagttttgaaatgaccttgatttttttaattgttatgaaaaaaaatgaactatgtcttggctctctcacatgctctgttactgagagagaccagcccaccctactctgatgtatagaccattctccctacaccagctaaacaaatgtcaaattaataaagaaacggactcatggc

SEQ ID NO: 31 - DNA, 2029 bp, Mus musculus
gctgaggcggcagcggtggcggcggctccggaggccgcagtccgcgtcccggcgtcggcccgtcccgcaccatggtgacgctcgccgagctgctggcgctgctggccgcgctgctggccacggcctcgggctactttgtcagcatcgacgcgcacgccgaggagtgcttcttcgagcgggtcacctccggcaccaagatgggcctcatcttcgaggtggcggagggcggcttcctggacatcgacgtggagatcacaggaccagataataaaggaatctataaaggagaccgggagtccagcgggaagtacacatttgcagcccacatggatgggacatacaagttctgctttagcaataggatgtccactatgactccaaagatagtaatgttcaccattgacattggggaggctcccaaaggacaagacatggagacagaagctcatcagaacaagctagaagaaatgattaatgagctggcagtggcaatgacagccgtaaagcacgaacaggagtacatggaagtccgggagagaatacacagagccatcaatgacaacacaaacagcagagtggtcctttggtccttcttcgaagctcttgttctagttgccatgacattgggacagatctactacctgaagagattttttgaagtccggagggttgtttaaaaggccttttcctgttgatcccaaattcatgatttacttgtttaccaaacaccttggtcataataatgtcattagtttatacatttttattttctgaacgttcatgacttatgtttctttgtgattagtaggtgttggggaaaacctgtttaagagagttagagtgaaaatttgacatttgattggcctataattcttacttgaaaggagccccattatataggcccttccaagaatccagaggctgttaatgctgtatgggactatggtctttattatgtttttacctttggttttcataataaaatgcagttcatccaggaagtagcccacagcctgacaatacttgttaactaactgcattctagtagtcccttggttcatcatcagaggctcattttgttattacagcaacagcaatctgaatcttgaccctgtggccccgcctcagggtggagagtcctgatggggcctgttaccagggtgggcactcatgctttctcttgagctcgatttaaagactcatcaaaactcttccccctaaagttttatattgaaccttagaactgaatcacctctaattgaattgaacaagcagccaataacttagccgttctttgaatccagtttcccaggtgttggaacagactgctgtcctgtgtgctgcagagtctgtcccttgttggcacttaggaagatccagtttctccctcactggaagtctgcacttctcaagcagaaggattaagcctctggggttgcttgcagtgataggcagccactgatgtctttttagtcagtggcctttgggccctggtcttcagtgtcagcactagggtttgtttgtcctctggggtcttttttggcacatgtcagttttgtttatataaaatgaagagactgtctctctgatgatgggtttaatgaaaggcactctgctttgggtgtgggcggtccaggattatgtggtaactattgtctgttagttacctggatattttatttttctttttggatcttgcaaggggaaaactacaagtaacaagttttataaatttaatttaaattgttacaggttttcatgttcaggacaaataatttttcaaccttcgatgatatccttgcagcagtttgttggtaaggtgactttcacctagggcagctgttgcatgccaattttttttttttgtgtgtgtgtgtgaaaacacttcagaattgaattaaaagatgtaaatttaaaattggttgtgtatctaatatgcccaggttcagtaaataaacaattctttttaaaaacaaaaaaaaaaaaaaaaaaaaaaaaaaaaaaaaaaaaaaaaaaaaaaaaaaaaaaa

SEQ ID NO: 32 - DNA, 4640 bp, Mus musculus
gcagctggggtggtgggcactgtgcgatggcgggggctgagggactcatggctgaagtaagctggaagctcttggaacgaagagcccgggccaagcgctcagttttaaaattggtgtagtttagcgtgcaacgcttatgataagaatcaacagtttgaaatggccaactcacctgatgcagccttctcttcacctgctttgttaaggtctggctcagtttatgaacctcttaaaagcattaatcttccaagacctgataatgaaactctatgggataagttggatcattattacagaattgtcaagtcaacgatgctgatgtatcaaagtccaactaccggtctctttcctactaaaacatgtggtggagaagagaagtccaaagtgcacgagagtctgtactgtgctgcgggtgcctgggccttggcgctagcatacaggcgcattgatgatgacaagggacggacccatgagctggagcactcggccataaagtgtatgagaggaattctctactgctacatgcggcaggctgataaggtccaacagtttaaacaagatccccggcccacaacatgtcttcactctgttttcagtgtgcacactggggatgagttgctcagctatgaagaatatggccatcttcagataaatgcagtctcactctttctcctttacctggtagaaatgatttcctcaggcctccagataatctataacacggatgaggtttcttttattcaaaaccttgtattttgtgtagagagagtttaccgtgttcctgactttggtgtctgggaaagaggaagcaaatataacaatggtagtaccgaactgcactcaagctctgttggtttagcaaaagcagccttagaagcaattaatggatttaacctctttggaaaccaggggtgttcctggtcagttatatttgtggatctcgatgctcacaaccgcaacaggcagacattgtgctcactgttacccagagaatcacgctctcataacacagatgctgccctgctcccgtgcatcagttaccctgcgtttgccttggatgatgaagcactgttcagccagacacttgataaagtgataagaaaattgaaaggaaaatatggatttaagcgtttcttgcgagatgggtacagaacgccattggaagatcccaacagacgctattacaaaccagcagagattaagctgtttgatggcattgaatgtgaatttcccatattcttcctttacatgatgatcgatggtgtttttagaggcaatcttgaacaagtcaaggaatatcaggaccttttgacacctttgcttcatcagaccacagaaggatatcctgttgtgccaaagtactattatgtgccagctgactttgtagaatgtgaaaaaagaaaccctggtagtcagaagcggtttccaagtaactgtggccgtgatgggaagttgtttctttggggacaagctctttatatcattgcaaaactcctagctgatgagttaatcagccctaaagacattgaccctgtccagcgctttgtcccacttcagaatcaacgtaacgtgagcatgagatactccaatcagggcccactggaaaatgacttggtggttcatgtagcacttgtagcagaaagccaacgccttcaagtttttctcaatacatatggtattcaaacccaaactcctcagcaggtggaacccattcagatctggcctcagcaggagcttgtaaaagcttatttccacctgggaatcaatgaaaagttgggtctgtctggaaggccagataggcccattggctgccttggtacatcaaagatttatcgcattctaggaaagactgtggtttgttaccctatcatctttgacctgagtgatttctacatgtctcaggacgttctgctgctcatagatgacataaagaacgcactacagttcattaagcaatattggaaaatgcatggacgcccactttttcttgttctcatccgagaagacaacataagaggtagcagattcaacccaatattagacatgctggcagcctttaaaaagggaataattggaggagtcaaagttcatgttgatcgtttacagacattgatatccggagctgtagtagagcagcttgactttctacgaattagtgacacagaaaagcttccagaatttaagagctttgaagaactagaatttcctaagcattcaaaagtcaaacggcagagcagtaccgcagatgctcctgaggcgcaacacgagccaggcatcaccattaccgagtggaaaaacaaatccacccacgaaatccttcagaagctgaatgactgcggttgtctggctggtcaaaccatcctgctgggtatactgctcaaaagagagggccctaactttatcacaatggaaggaactgtgtctgatcacattgagagagtgtatagaagagctggcagcaaaaagctttggtcggttgtacgccgtgcagcaagtcttttaaataaagtagtggacagcctggccccatccattactaatgttttagtgcagggcaaacaggtaactctaggtgcctttggacatgaagaggaggtcatctctaacccactgtctccaagagtgattaagaacataatctattataagtgcaatacccacgatgagagggaggcagtcattcagcaagaactggtcatccacatcggctggatcatctccaacagccctgagttgttcagcggcatgctgaaaatacgcattgggtggatcatccacgccatggagtatgaactgcaggtccggggcggggataagccagctgtggacttgtaccagctctcgcccagtgaagtgaagcagctgctgctagacattctccagcctcaacagagtggaagatgttggttgaatagacgtcagattgatgggtcattgaatagaacacccccggaattctatgaccgagtgtggcagatcctggaacgcacacctaatggtatcgttgtagctggaaagcatttgccacagcaaccaactttgtcggatatgaccatgtatgagatgaatttttctctccttgttgaagatatgctgggaaacattgaccagccaaagtatagacagatcatagttgagttactaatggtcgtatccattgtgctggaaagaaaccctgaactggagtttcaagacaaagtggatctggacagactggttaaagaagcgtttcatgagtttcaaaaagatgagagtcggctaaaagaaatcgaaaaacaagatgatatgacttccttttacaacacgcccccactgggaaaaagaggaacctgcagctacttgacgaaggttgtgatgaactcactgctcgagggagaagtcaagcccagcaatgaggactcctgcctggttagctagtgcggctggtcctgtagggagcataggtgatggttttccagctgtgccttttgtgttgacattaaccagacagccattagtgagtgaacagatgtgttagtgtggtgggtgctgtattctgtttgtcatgattggacctttgcatgcaggtggcattcgaatggtaagcaatgattgaaatcaagcggaacccgtttccatgatttgtaccagcaactctaatcttcactgaaccatagaaatagtttatgaatcgaaaattcacaactgcatgttttgtgatcaaatattccatcaaaattctgagtcttcgcttctttagacttcattttgaccttcctgtattagaacaagcctggcaagggctgatgctgtcctgggactcacaaggtactggaggatggtgatggctatgcctctgttgtaccacaaaaccgagacgtgtaacacacatcagaaaaacaaaattagcccctggtatttaacttaagaagcttcattgttaataataccatgttgtacagaactgttagatggtttttaccttgtaaacatgactgtagttttgtattgagctgcatataagggttggactaaaatataatatatcaagcattttctgagcatctgttaaatataggaatacagaagtgccagtcagacagagctgggaatcatgatacaatccagccttaaaaattagacaaagataagaagtagattacttgtcttagtgtgttaagagaagttatgataagatggtccggatgaagccatctgtaaaacctaagcctgaaaaaacagtcatgaagcccatgcagaaagagtaacttctggtggttgatgggcagggaagagaaattaaagaacgagagggaggaaaagcccttgaaatatttaaaacttgttaaaattcagaagaaagtaaacacttgtatccttaagaattaaattttttgattagctgagcaaagttgcaagggaaacgctgtcttagttaaaatagacatcacttgcaagtctgtttctgaatgagcagttagcttcctattacatatgcaaagtttggagctttcttctgctgcttgaaagcattcgaaatcagcaactgtgcgtcagctttttaaattgtgaaatgcaaaatttattgttctgcaagatattttgggatgatcaataaatcttgatgttcctccatcaaaaaaaaaaaaaaaaaaaaaaaa

SEQ ID NO: 33 - DNA, 1306 bp, Mus musculus
ccaggctttctagcccaagtggccatggcggggagccggctggagacggtggggagcgtgttctcccggacgagggatctgatgcgggccggggtgttgaaagagaagccactgtggtatgacatatataaggcctttccacccctgagagagcctgtcttccgaaggccccgcttgcgatatggcaaagccaaagctgacatccaggacatcttttaccaggaggatcagattcgagcgaaattctttgcaacctatggatctggtcagaaagcttttgatctcttcaacccaaacttcaagtctacctgtcagcggtttgtggagaagtacacagagcttcagaatcttggagaaacagacgaagagaagttatttgtagaaacggggaaggctctgttggcagaaggcatcattttaagaagagttcgagaagcaaggactgtcagcgtgagactccaagcttcatcagaaggacatgagcctcaggaagacgatgacctggcgcagcgggggcaggtgaagcaggagccagaaacagccccgtcccctccctgaggcccttcagcgcatgagcacacccatcaccgctggcccaagctgatggactctgatggcctccatctctcaggcacgtgtgccttctcttagtccctgttttcgggatgttatgaatctcagtactgtggtttgaaagcaccagctttgtgaacttttatttcaagacatggttaaataaagggttctccaatgcttacaaagtaaatttactttgaaactgtaaataacaccaggaagcctttaaaggtgccttgtgctggccttgggctgccggcatctgaactctttgggcttctcgtctggatccctcagaatcctacttggccacaaggtccggtccctcggccgtgtctgcgggtggtgtttgtactttttttctgtagagctgttgactgcatcctgacaggcacagcagaggcacagccaactcctgctccgagtgcctgtttgatgtggacgaagatcacacccagtccttggatgtcacgggttgggttcattgctcttgagatgatcagcatgggctcacagctcataggctgcctagaaattgtttggtgactgaataaatgaccatacctagctaaagactgacgttttcctagtcactggatttccaagatggcaggggtaaggtctgattcaggtggtcttccccacaaacatcctgccgccctggtactgcttccttgtgttgtgttacactaaataaatgtgatatcctgttgtgaaaaaaaaaaaaaaa

SEQ ID NO: 34 - DNA, 986 bp, Mus musculus
gagtcactgggtgtgtcttcctgcacagtggacttgacgggcctggagggaggagaggaaattgaaacctatctcatcctctagtttatttacatcattggattcggttcctgtttggaaacttaactggtcctcatggcgttttcgggcacagggacactggtggcttccattgtctccaagatgacatcttcagcagccatggtcaaagctggaggggcagtctctggcaccattctagctggttcgaaggggctcatcctgttaacacagagtgccctgggctctgcaacatctgcacttggagcactgaaggttggcaccattttatctgggttctctgcctccaccttggctgcttcccccattggagaggaacctgctttggtgggcagggagaagaaaagtgacttcagattttccttccccgcagcaggcaaagcagcaagaaggcagagaaaggaaggacaaagcaaaatctacctgaagggttttgagttctccagagccaaggctgttgtggctgtgcttgggggagccatgacagtagctgctgtaccacctgcgctgagtgctgtgggcttcaccgcctcaggaattgcagcctcctctctagcagctaagatgatgtccttgtcagctattgctaatgggggtggagtcccagctggtggcctggtggccattctgcagtctgctggagctgctggactctccgtgccatctactgtcatcgtgggctctgcagggtctgccgttgtggccagtgtcatgaacatctgtgagagtttctacccttttctcatgggatcagaggtggcagacatggcgacagaggtggcagatatggcgatagaggtggcagacatttcaacagaagaggcactgcccaacttgtctaacacagagaaggattaattacccccaggcgacaatctcctaacacatattgcctaggtggaaataaattaaaccgagttcttgcc

SEQ ID NO: 35 - DNA, 3939 bp, Mus musculus
tggagagtgaggacgctgggctggagactgaagagagaagctactgcaagtcccccatctcagccacccagcgggtctgaacacatctgctatatggactagagtggtcggcaggctcctttccgatcttgtccccctgcccttccctcgtagtctctgcatttctcccccaaggtggcattagcaggcttgaggctcccaggggataggaacgcctggcctggcgtgcttagcaccgcaccatgaccctcctgctggtgtcccttttgctggcctctctgcttcaaatcagctctggcaacaaagccaacaagcacaagccatggatcgaggcagagtaccagggcattgtcatggagaatgacaacacggtcctgttgaacccaccactctttgccttggataaagatgctccactgcgctatgcaggtgagatctgcggcttccggctccatggatctggggtacccttcgaggctgtgatcctggacaaggcaacgggtgaagggctgatccgggctaaggagcccgtggactgtgaggcccagaaggaacacacttttaccattcaggcttatgactgtggcgagggacccgatggcaccaataccaagaagtctcacaaggcaaccgtgcatgttcgggtcaatgatgtgaatgagtttgccccggtctttgtggagcgtctgtaccgtgctgcagtgacggaggggaagctgtatgatcggatcttacgtgtggaagccattgatggcgactgctccccgcagtacagccagatctgctactatgagatccttacgcccaacacccctttcctcattgacaatgatggcaacattgagaacacagagaagctacagtacagtggcgagaaactctacaagttcacagtgacagcgtatgactgtgggaagaagcgagcggcagatgatgctgaggtggagattcaggtgaagcccacctgcaaacccagctggcaaggctggaacaaaaggattgaatatgccccaggagccgggagcttggctttgttccctggcatccgtctggagacctgtgatgagccactgtggaacattcaggccaccatagagctgcagaccagccatgtggccaagggctgcgaccgagacaactattcagagagggctctgcggaagctctgtggtgctgctactggggaggtggacctgttgcccatgcccggccccaatgccaactggacagcggggctgtcggtgcactacagccaggacagcagcctcatctactggttcaatggcacacaagctgtgcaagttcccctgggtggtccagcagggctgggctctgggccgcaggatggcttcagcgaccactttaccctgtccttctggatgaagcatagtgtgactcccagcaaggggaagaaggaggaggagaccattgtgtgtaacacagtccagaatgaggacggctactctcactactcactgactgtccatggctgcagaattgcctttctctactggccgttgcttgagagtgctcgtcctgtcaagttcctctggaagctggagcaggtgtgtgatgatgaatggcatcactacgccctgaacctggagttccccacggtcacactgtatactgacggtatctccttcgacccggctctcatccacgacaatggtctcatccacccacccaggagggaacctgcactcatgattggggcctgctggactgaagagaagaacaaagagaagaaggggggagagaacagtacagacacagcctcaggagaccccttgctgatccaccactactttcatggctacctagctggtttcagcgtgcgctcaggtcgcctggagagccgtgaggtcatcgagtgcctctatgcatgtcgggaggggctggactatagggatttcgagagcctgggcaaaggcatgaaggtccacgtgaacccctcgcagtccctgctcaccctggagggggatgatgtggagaccttcaaccatgccctgcagcatgtggcttacatgaacactctgcgctttgccacacccggcgtcaggcccctgcgcctcaccaccgctgtcaagtgctttagtgaagagtcctgtgtctccatccctgaagtggagggctatgtggtggttcttcagcccgacgccccccagatccttctgagtggcacagctcattttgcccgcccagctgtggactttgagggacccgagggagtccccttgttccccgatcttcagatcacctgctccatttctcaccaggtggaggccaaagcagatgagagttggcagggcacagtgacagacacacgcatgtcagatgagattgtacacaacttggacggctgtgagatttctctggtgggggatgacctagaccctgaacgagagagcctgctcttggacatggcttccctgcagcagcgaggcctggaactcaccaacacatctgcctacctcaccattgctggggtggagaccatcactgtgtatgaagagatcctgaggcaggctcgttatcagcttcggcatggagctgccctttatgccaggaaattccggctttcttgctcggagatgaacggccgatactccagcaacgaattcattgtggaggtcaacgtcctgcatagcatgaaccgggtggcccatcccagtcatgtgctcagttcacagcagttcctgcaccggggtcaccagcctcctcctgagatggctggacacagcctggccagctcccaccggaactccatggtccccagtgctgcgactctcatcattgtggtatgcgtgggctttctggtgcttatggttatcctcggcctcgttcggatccactcccttcatcgccgcgtctcaggaactggcggaccttcaggggcttccactgacccgaaggaccctgacctcttctgggatgactctgctctcaccattattgtcaatcctatggagtcctaccagaaccagcagacctgtgtggcaggggtggctggtggccagcaagaggaagaggacagcagtgactcggaagcagccgactcccccagcagtgatgagagacgcatcattgagagccccccacaccgctattgaggcgccaaccctgccaagagagagaggcctgccctggggagacaggcactcaggaaaaaaaagggagaacggcattttgagagaagagagaccgaggggggagaaagagctcttcatttggagcagtccttcaatctcagaaccccaggaggccccacaggagttgccctcctccttcagcctgcccctgccttgggctgcccttcccctggtgtactcctgaggtgtctgccccagctggctgccctgggagagtggctggatggctttggctgccctgtagcctacctgtggcagcatactgtgcccagccatgcactgtattagggagggggatgtcaacagccttggttgaggtgggaatgcaattgatgggagcctgctgctgtgtccttctctactctgttctgtccgtgagggctttccttctgttgcccctccccctcccgcttcccctaggatcccctcgcctctatttccatttcactctggggatccctgctcctccctcttctcagcctcctccctcttttgtcctcttttcctctcctgcctgagcagtaccaaggtcttactgtctctattcctttctccatggcctgctttgcctgggttgtggggaaggaggaggagggggaccctgggggtgtattatatatagtgtatattttttcaatgttgtcgtgagcgcagctcctgtgtttctgtgtgcagctcacagccttgtatgtgtgcgtgtgcgtggcattgtcatgtcctgggatgagggtagggggtgggtgtggtaaaggagggccgcaccctagggttttcaaataaaacaact

SEQ ID NO: 36 - DNA, 3208 bp, Mus musculus
gccggcgacattagctagcgctcgctcaactctcctaacgggaaagcagcggactacaagagactgaactgtatctgcctctatttccaacagactcacgttcaactttcgctcacgaaaatagccgggaaaattttattagtcctttttttaaaaaaaagttaatataaaattatagcaaaaaaaaaaaaaaaaaggaacctgaactttagtaacacagctggaacaatccgcagcggcggcaggagcggcgggagaagagatttaatttagttgattttctgtggttgttggttgttcgctagtctcacggtgatggaagctgcacattttttcgaagggacggagaaactgctggaggtctggttttccagacagcagtccgacgcaagccagggatctggggatcttcgtaccatcccaagatctgaatgggatgtccttttgaaggatgtgcagtgctcaatcataagtgtgacaaagactgacaagcaggaagcttatgtactcagtgagagtagcatgtttgtctccaagagacgtttcattttgaagacatgtggtaccaccctcttactgaaagcactggttcccctgttgaagcttgctagggattacagtgggtttgactcaattcaaagcttcttttattctcgtaagaatttcatgaagccttctcaccaagggtacccacaccggaatttccaggaagaaatcgagtttcttaatgcaattttcccaaatggagcagcatattgtatgggacgcatgaattctgactgctggtacttgtatactttggatttcccagagagccgagtaatcagtcagccagatcaaacactggaaattctgatgagtgagcttgacccagcagttatggaccagttctacatgaaagatggtgttactgcaaaggatgtcactcgtgagagtggaattcgtgacctgataccaggttctgtcattgatgccacactgttcaatccttgtggctactcgatgaatggaatgaaatcggatggaacatattggactattcacatcactccagaaccagaattttcttatgttagctttgaaacaaacctaagtcagacctcctatgacgacctgatcaggaaagttgtggaagtcttcaagccaggaaaatttgtgaccaccttgtttgttaatcagagttctaaatgtcgcacagtgctttcttcgccccagaagattgacggctttaaacgtcttgattgccagagtgctatgttcaacgattacaattttgtttttaccagttttgctaagaaacagcaacaacagcagagttgattaggaaaaatgaagaagaaaaaacgcaaaaagagaagacacacaggaggtggtggctgctttctagatgctgatcctgagggccatgctgaccatgaccaccacctcgtagttgcagaaagccctaggtgtaatgatagtgtaatcattttgaagtgtatgcattattatatcaaggagttaggtatcttgcatgaatgctctcttctgtgtttaggtgttctatgccactcttgctgtggaactgaagtgcatgtagaaaagacctttgactgtatgaatctttacgacacttgtgaaaatgatacaatttggtttatgcacagtgtaatatttctgcaggcatcatccaaaattccccacagacaaggctttcgtccccattagatgcggcctcagctgacatctgtgactgttctattaaattgctgccagagtttttacatccaggcacctccactttctagggcatattctctactaatgttactcaaaaccaatttctacttcatacaggtgttttatgcaatggcaattaaagtttttcttccacaagttgagtctttgtaagaaaatgactccagttgcttgttttatgttctgctgttttaataattgctcctgcatttagagtcctatagtttttccaccacctttgatgaagcaatacactgttacactgtgggcttatattataattttacaccccaggtgagagtttggagatggtcccttgcttaattttttttcctaagacataagaatgtggtctctttattggcatgaacttctgtggaagataaatgacaaaactgaatgtatcaaatgaaaagaactcacagtctccagggcgatgagcaaggagaacccattaaagaaaactccatggaaatgataggctgtgcagtgcaccttaattagcgttaatggagtgcctactatgccctcactaatttactaagtgataggaatgtccactatgtcaaagcagaaatgtagtcctagcattctgacctcagtaagtgctgccgttgccaccaggttttatttactaaaggagattttgattcgaaggagaatctggtttctacttgtcctaccgtcagctggtctctggtcttcctttcaccgtggccttcagatgatcagatgaatgactgaccagagggaggaggcctctccaggttactcagccagatagtgaatgtatgaatggatggaacggcgcaatattctgaatctatttaatggcactagaaataatgggcgttgaagagtcggcatgttggtgggacttaaacagaaaagagcaaactggactaaactccctatttattgcccttctgttttcttggtagtttctggactgatgcagtgatgttttgttccttccgtatttataacgaaacacttttttagcgtttctaaacagagtctacttggtttgagatcaagtggttggaacactgtctggactctttctacacggtgttgattgaaggcttctttggggaagctttcggtcagctttatctgtctgattctgtaatgagcacagcacctattttgaattgctatttggagggccagtgcttatttaagctggattttgtaacccagtagattttggcttgaggtctgatttccccgtcttaaattaagaatcctaatgttgagaattgcataggtttgtgtggaacaaagcctagaacaactgtaggtaaactagtgatctagtctaattacaggtggggaagttttggtgccataatttctctttgttggtgttggacttttaatcagctgaaatgtatttctgtaccacaatgtaagcttcaataaaagtttgcttaattgtctagtaacattgaaaaaaaaaaaaaaaaaa

SEQ ID NO: 37 - DNA, 4021 bp, Mus musculus
gggagtctcgtgtccgtggtgccgttactcgaagtcgggcggcggctgaggctcagcgcacaacgcaggtagcgcgttagcagcagcagaagcggaggcacctcggcggtcacagcccctgcgctggtgcagccaccctcgcctgctccgttcttccttccttcgctcgcaccatggctgatcagctgactgaagagcagattgctgaattcaaggaagctttctccctattcgataaagatggtgacggcaccatcacaaccaaggaactggggaccgtcatgcggtcactgggtcagaacccaacagaagccgagctgcaggatatgatcaacgaagtggatgctgatggcaatggcaccattgacttcccagagttcttgactatgatggctagaaaaatgaaagacacagatagcgaagaagagatccgcgaggccttccgagtgtttgacaaggatgggaatggttacatcagtgcggcagaactgcgccacgtcatgacaaacttaggagaaaagctaacagatgaagaagtagatgaaatgatcagagaagcagatattgatggcgacggacaagtcaactatgaagaattcgtacagatgatgactgcaaaatgaagacctactttcaactacttttccccctctagaagaatcaaattgaaatcttttacttacctcttacaaaaaaaagaaaaaaaaagaaaaagttcatttcttcattctgtttgtatctagcgaagctgaatgtcagaagcccctctgtccacacacaaagtctgcatgtattggtcggtggtcctgcccctaaagtcaagcccctacatcagttttacagtataaatactcgtactaccttataaggaagcacttagtggactccttaaagttccatttgctaatgattaatacactgtttgggctggccagtttctcatgcatgcagcttgatgattgagcacagtcaggcatttgtattaaaactgaaaaatggaaaaaacaaattcaaaatctcagatggcttctagttcaatctgttcagataaattgtcagcagccagtttactgcaagcaaacatttaaaattggtttacctcaggatgattgatgtgcagagaatgggggaaggctaaactctgagacacagccccagaagtaggacagtcctcatcaagtgccccagtcccatggtgacagtgacaccctggtggcgagcccgagtgtgatggttcattgctgtgcgcattgcattggagtgactgaacaacaaggctgtcaccaaatcccacacattttattaagaaatgtttcctaagggagcatttttggactgtgttttaaaacctagtgaaccatgactcggagccagcagagtaggctgtgtctgtggacttgagcacaccatcaacattgctgttcaggaaatgataatttacgtccattccaagttgtaaatgctagtcttttatttttttttttccaataaaaagaccattaacttaaaagtggtgttaaatgctttgtaaagctgagattggaagggggacaaggccaaggccgctggaggggaggtcagcatacacagagacacgcaacatccagtgcaagctggatttcccaccaggttctctagccacaactcctgaaaccagacagactcggagttctttgccgtctatgaccacgtaagtcttgttattttctgtgttgtgtgcacatgcgcagatcacagtcaggtgatgttcagactagagccctggtgagagaaggcgtctccagcgtacagttaggatgtcttggctgtgctgctgctgacctgttgtaactacatgaggccatctgtgcgggagacatgatttagtgtgtctgtattcctatactcactgtgtatggcaaaagcaggccagacaaagacactacctttgattcagtttgtaatttatggttatacttatctttagccgctatacttctttattattattatttaactgccttttctccccgttgagtacagttagtgcataacactgtagcttgagagcaaagaaacgaaacaatatcccagaatgaatttcctgtctaattacaaacctgtaaccaaaacgtagacctgctggtactggtcccttccaaggcactggtctacttaaaaagccccccttagaagtgtgttgcatttaaaaaacaagggccttatacatttttcagggtgttaactggttgtatctgactagcaaggagctttggcttccaagttcgggggtgtcggagctgcaggcttctagcaaggcaatgagaagcccttggcaaccacgtgggtgcactcggggctaacctctagatccctggttgctccctctcctgctccctgtctttctggcgttttgtagctccttagattttttttttttttttttctgccagagggatgggtccgagcagtagagaggaagacattgcctgagcacctctgctcatccttggactgggtggttggcacaggctgatgactttgactttggtatctgaatcgttaggtattccctcctggtagagaggactgggggagggggggttccaggtgtgaagaagtgaatggcagtggatatgtcttgtaagaggattaaatcacccagttgatgacccggtctcaggcttgtctgtaacctcttggtgatttcaaaggggtttggaggtgactttttaaaaaattgcctcctatcttttaccaagtctgtagaagctgggtagatgatgctttaacagcccatagcctgtcctaaaagcttacctccaaaacaggattcttgtgtaactaggaatcctgcatgagaaccagaaaccctaacctccgaggaatgtgaagctggggtttggaactgtaggaggcagagtcgtcccccccccccccacttcagccttctggcatcctggggcacaggcagcccagggcttggtgttggcagtttgagttcgtgagatagaaagagtggggtgtcaaggcagtacccctgaggtcagataacactttcctgtaaactgtccctcacttataactactctataaatatatacatatatttatataaatatatatatataaagtgactagttaactggcatcctgctttagcctgagacttgccctaagaaactgctgagcccttggcacacctctacatagtgtgttttctgtctgttggggggagctgttgaacaaggcaaacatcttgatagttcagatgggctttaatgtactgttgccagggaaggctttttctgattttttgacaaatttttgcacactttaattggtgtctttgagcaacttaaacacattgaagatgagctattgtacatatttttatattctctttataagtgcatgtccaacttgtaactatattgtaaggaatggctgcccggtaggcctagtgttatgtcacacaagaggaatagcatctatcattcgcccctcagcatcctgggaacttcttcttgaatgaagactgtaaatttggtcaagtcaactcttagttcagttatcttaatcatttgaatgatttattgtgtgtcctatgtgtatttctctttggcagcgaccagagttacactgatgtgtcccaactgacccactcagctggcggtcacctacttaatttttttcaataccccttgaagttgtccggtagaagtcagattatttgccatctatccctttgagtaagaaatcagggatgtgtgctcctcccctatatcgacgatgttcattaaaacacctatagcaaggatggtggtggtccttctgttaccgaagtcacccttcactgtggctgtttgacaaagagttgtacttggacgttgtgtaaatcttgagataaactgttttggagatttaaccacctctctgacgggggaccaactctatggaaattgtaaataagttttatttataaacctggcactgtattcaataaacatttctgcagccttaaaaaaaaaaaaaaaaaaaa

SEQ ID NO: 38 - DNA, 3934 bp, Mus musculus
gactctttgggaagccaatagagaagacggaagggtctcccggtctaacccttgccgccacatccattggattccaacccgaagagggtagacagaaaggcgggaaagggctgtgaggtcaaatggaccccatggaactgaacaacgtcagcatcgaacccgacggagacagctgcagcggggacagtattcaggacagctacaccggcatggaaaactccgacaaggacgccatgaacagccaatttgctaatgaagatgccgaaagtcagaagttcctgacaaatgggtttttagggaagaagaagctagccgattacgcggatgagcatcaccctggaatgacttcctttggaatgtcctcatttaacctgagcaacgccatcatgggcagtgggatcttaggcttgtcctatgccatggccaacaccgggatcatcctttttataatcatgctgcttactgtggcaatactctcgctctactcggttcaccttttgctgaagacagccaaggaaggagggtctctaatctatgaaaaattgggcgagaaagcatttggatggcctgggaaaattggagccttcatctctattacaatgcagaacattggagccatgtcaagctacctcttcatcattaagtacgaactgcctgaagtaatcagagcattcatgggacttgaagaaaacactggggaatggtacctcaacggcaactacctcgtcttatttgtgtccgtggggatcatcctcccgctctctctccttaaaaatttaggctaccttggctacaccagtggattttctctctcctgcatggtgtttttcgtcagtgtggtgatttacaaaaaattccaaattccctgccctctgcctgctctggatcacaacaacggaaatctgacgttcaacaacacacttccgattcacatgatctcgctgcctaatgactcggagagctcgggtgtgaacttcatgatggattacgctcaccacaacccagctgggctggatgagaagcaggtcgcaggccctcttcacagcaatggcgtggagtacgaagcccagggtgctgagaaatgccaaccaaaatactttgtgttcaattcccggacggcctatgcaatcccaatcctggcttttgcttttgtctgccaccctgaggtccttcccatctacagcgagcttaaagatcgatcccgcagaaagatgcagacggtgtccaacatttccatctcaggcatgctcgtcatgtaccttcttgcggccctctttggttatctgagcttctacggggacgttgaagacgagctgctgcatgcttacagcaaggtctacacatttgatacggctcttctcatggtgcgcctggcagtcctggtggcagtgacactgaccgtgcccatcgtgctgttcccgatccgtacttcggtgatcacactgctgtttccaaggaaacccttcagctggctgaagcatttcgggatcgctgcaatcatcatcgcactcaacaacatcctggtcatcctcgtgcctaccatcaaatacatctttggattcataggggcttcttctgccactatgctgattttcattcttccggctgcgttttatctcaagctcgtcaagaaagaacctctaagatcaccccagaagattggggctttggtcttccttgtgactggaattattttcatgatgggaagcatggcgctcattatactcgactggatctacaacccgccgaatcccaatcaccactaatcccggggagacgcgtctccactggaaacagctgaaattgtctgaaggacattttagttgtcttgattgggatgttagtctgaggaattagcaagattccaaagacgtttttctagctctatcatgggatacttgtggaagagaaaattatgggttttgttgggaatggttttgttgggaatggtgaaggatgcattaaaaattctgtggcacacattttaacccaggccgtgcagtgcagtgtgtgatgcccgagttgtgtttgcagcagctgtgcaagctgaagcctgttggctgcgtgtgttggtcagcagacaatagcctgtccccccatggtcactccacttctctccacccccagattaacaggtaattctactctcagaacatcagacaaagacctcctggttggcgaagctatcatcagttacggccatctctcactctacaccaacactaagggtcggttgactagctgaggcagggggatatcttgggagctgtccctgtgaggatcatgaatgacggttgccagtatagagtacttcatttcaatactcaaggaatagtttgcccaacctgcttattacaccgagttagtgaattttcattctttttattttttggtatggcaaatgttcaaacatctcactaaacatagaggggggttatttagtttatcatgaaacaactaccaaaaagtaatggtttttaacatctgccttttcatgttgtttctgatatctttgttccactttgtctttgaacaaggcttcccctctcgtcttccgttctcactcttcgtaattttcagaagaccacagtccgtgtggagacacactacccagtattgtttgatacatctctatttgataaacattcagtgcaggaaactgtgattttgctatatgtttgtgtacataatctcattctgcagttatcagaacgttgacatatgggacattggatttttattttttacatatgtaggtttttttttcttcacagacaaaatgtttatatcatcagggtggggcagggaattaagctggtgggctcaaaaatccatgggtacttatctgtccattggagacatctaaaaattaaagtcaaagttgtgcatagttcagtaatgctcttcactgtttacaagactataatcatctcagcaaagtagcgaaggaagggtttgtaaataattttcagtgctaacaatggtctttgaatttaacatgtctagaatagggtttagttcattttagtttacatcggaacttggtgacattcatttgccattaatagaacatcgtgtggttaggaataaatgcaccaacatgacccaaaaccacattgctcacatccatggacgcttacacgggatggagttcagactccgcccactgcctagaatctctggcattgacttctttttttcaattactggttgtatattttacatttcagtaaaaagccaagtctgaaatgcaagtatcctacaggtagtgatagtactgtcacaccaaagcagtttttcaacagtgtgcctaagaaacatatatttgtttactgtgtcattttctggaccttaagactatacaatggtgtgctttgtgatagaaattgagcattactagaaactaccataacttcggagttattatcatttgggagggaaaaaaatcaccaaataggatctttaagatgtctttctattttcattcatccaagaaataaatcaagatagaaagcagaaagggtgtgctgcaaatattaaatatattttatctgaacatattaaatgtgaatataaaagattaatccaaaaatattggaaacctgtgaaatctgtacgtatttcgaatctttacacttagagcagctaacctggaagtatccacttgtgtagttagatattcaagagcaatatcacagtgccaaagacttcattcacacagcaccgatcatttgtgtggccgttttcaggattagagttcacacagactccagggcagatactcagaataccgttttctggtaaatttaacccatttgtaaacagatacaaattttattttcttacatcatttataagacggttcaatgtactggggggattttttttattacagactgtgtattggtatataataaataaacttttcaaatgt

SEQ ID NO: 39 - DNA, 865 bp, Mus musculus
cgaggggaggagggcaagatggcggccggtgagtgattctccctggcttccttcagggcggaggagacgccggggcgggggacccgctcgtgcagcccgccggcctcctcacccccgcccccggaggcctcctctttcccgtcctccacctcgggggcaggccagcatcctcggacaccatgtcagactctgaggaggagagccaggaccggcaactgaaaatcgtcgtgctgggggacggcacctcggggaagacctccttagctacgtgttttgctcaagagacatttgggaagcagtacaagcagacgataggactggatttctttttgagaaggattaccttaccaggaaatttgaatgttactcttcaagtttgggatataggagggcagacaataggtggcaagatgttggataaatacatctatggagcacagggaatcctcttggtatatgatattacaaactaccaaagctttgagaatttggaagattggtattctgtggtgaagacagtaagtgaagagtcagaaactcagcccctggttgctttagtgggcaataaaattgacttggagcatatgcgaacagtaaaagctgataagcacttacgattttgccaggaaaatggttttagtagccactttgtttcagccaagacaggagactctgtcttcctgtgttttcagaaagttgcagcagaaatcctgggaatcaaattaaacaaagcagaaatagaacagtcacagactgtatgagagtgcttccagatgagtcatgatctccttggatcattggggatcgatcacactggacctgttgtgcagatggttttctcagataaataaatttatttaaaatg

SEQ ID NO: 40 - DNA, 3276 bp, Mus musculus
cggactggctccaggcagggctgtgtgcagtcaccatgaatgctcagctctaggcttctgcaccagcctcctgaccacatggatctggctgtttaatcagccgagatcacagcctgggaagattggagaggctgattcgcgctccagctgccaaggcaacttccagcttggctgtttacttctttgggtcccggggactctgtcctgcccttcagcttcttctgccactgtgtgggtcctgaagtcagctgctgggactcctctgaaggcatccaggaaggggggcaagaggggttaaaagacagtcgaaatccccccaactgctcaccctctgccgaccgcctgtgctgtggggttctgagaggaccttgctctgtcctgggaagcaatgcaagtctccatagcctgcacagagcacaatttgaagagtcgaaatggtgaggaccgacttctgagcaagcagagctccaccgcccccaatgtggtgaacgcagcccgggccaaattccgcactgtcgctatcatcgctcgcagcctggggaccttcacccctcagcatcacatttctctcaaagagtccaccgcaaagcagactggcatgaaatataggaatcttgggaaatcaggactcagagtttcgtgcttgggtcttggaacatgggtgacatttggaggtcaaatctcagatgaagttgctgaacggctgatgacaattgcctacgaaagtggagttaatctcttcgacacggctgaggtctatgctgctgggaaggctgaggtgattctgggaagcatcatcaagaagaaaggctggaggaggtccagcttggtcatcacaaccaaactctactggggtggaaaagctgagacagaaaggggactgtcaagaaagcatatcattgaaggactgaacggctccctccagaggctgcaactggaatacgtggatgtggtctttgcaaatcgcccagacagcaacactcccatggaagaaatcgttcgagccatgacgcacgtgatcaaccaaggcatggccatgtactggggcacctcgaggtggagcgcgatggagatcatggaagcctactctgtcgcacggcagttcaacatgatcccgcctgtctgtgagcaagctgagtaccatcttttccagagagagaaggtggaggtccagctgccggagctctaccataaaataggagttggtgcaatgacatggtctccacttgcttgtggaattatttcaggaaaatatggaaatggggtgccagaaagttctagagcttcactgaagtgctaccagtggttgaaggaaagaatcgtaagtgaagaagggagaaaacagcaaaacaagctgaaagacctctctccaatcgctgagcgcctggggtgcacgctacctcagctggctgtggcgtggtgcctgagaaatgagggtgtgagttctgtgctcctgggatcatccactccggaacaactcattgaaaaccttggtgccattcaggtcctccctaagatgacatctcacgtggtgaacgagattgataacatactgcgcaacaagccctacagcaaaaaggactatagatcataaggcaatgcatgagccacttaagctgcatgggtaaagtcatgatgggtaggcagtgcagaacggccttaccagccactcttttcaatcacttagcagtttgctgctcaacctctagtgtcccaggattctctgaggtttctgctgttgctaccactgtgcaccctgaattctgaacacatctgaaaattcacaagccagaaaatccattctattttcttatcttggactggtcccctaccctggcactggtctgtgtacctcatgtttttgcaatggaaagaatgctggggtaggggaatctattatcttcagaagaaggctgtacatatatatttttttcaaaagaacaaatttcacaagatacagtatatgacctgcataggaaacaggatatcctcactctttagtcttgctcgggagaacaaactgaactagatttttccccccatatttcatattcacactagcaagttttatgtcacctgatattcaaataaaatttctagatatttgctttcactatctctaaagttatattgttgcctggccctgtacaatttaactggggtgtctctcagggttctaacatatccatttgcatagttataaaggcatgactatcccaagatacataatagatacataatgctgatttataaaaaggtcacaatgttatggaaacagctttaaataaaatgttaagtgttcattttttactttctattaaagcctacatttactttcaattgcttgtaggcacaacttctgttgaggctaaatatttgactttaaaaatacatacatgttcagttttgtaattaaacctataaatacccagaaaggcaagtgttcaatttaccattgggacattatcatataatgcttggaattttctgaagttattaacatgaaaacaaatcataggcgatgttaagaaaaagacaaaaaaacattttttttctcattcctcggcacatgctagatgacttaacttgcccaaagaaaaagcaaaatattcaagaagctcctggttcgaattgtatcacaccctacaccatatgcatgaaagctctttgcatggaataaaggggcctagctttgcactcagaatctgagatacacttagctctgcctctacgggctaattcccctcactgtatcccacttgagaaaaactgtaaaactatatatactgtgtggctatctgtaaatacggataagacacaaggggtttttgttgttgttttgttttctgtaaaggtggggtcattttctaactcttatttgtctaactatagatgggcaacattctacttcatctagttagcaagttctccatcactttaagatttacacaagaaatatacgaacttaaaatcattttcggatatgtaccacatggttaagttctaaatcttaaactatcagtgaaagataccaagaaatatgattgtgactacctagctagcctccagcaggcaacttgggagtttcacccgtgaatatctgaataatgatagagatgagctaactttccatctattcactgtaaatgtaatccactgaactactgtacgtataaatgagtggagtgctgtctaaataaaaatcaatttatttgcttagagtaataaaggcatctgcaatctcaaaaaaaaaaaaaaaaaaaaaaaaaaaaaaaa

SEQ ID NO: 41 - DNA, 12050 bp, Mus musculus
gcggggaagttggcagggactggaaccagaggaagctgagccagggccgcagaagctccgtggcgaaactttcttgacgccttctatttaaaggcttggggcgaccccgccccgcgcgccgggaacccaagcagccccgcgggccctggcaaagtgcagtcagacggagaacaccgggcgaggcgtgggcagctccgactccggccaggacaggcgcgatggagagcggcgacagcggactcgcagcccagggcttcctaggatggggtgcagacgaggaggtggcccaggagctggagacggaggaggagtcggagggcgagggggaggagacggcggccgagtcggaggaggagcccgacgccaggttatcagatgaggatgaggagggcaagaccaagcaggagtgtatcgtctctgacccttccttttccatggtggcagttcaacgtgaagacagtgggataacctgggagaccaactcaagcagatcttccactccttgggcttctggagaaagtcagacctcgggaatatgtagtttggaagggtcagctctgacttctcctccaggaagtgtttcctttattatggatgaagttaaaaggacacggaaaagaactcagaagtccaagcgtggctcaccatcactgcgtcggaaaggcagcaaaaaaaggaattctctggaatcacaagatgttctgacaaaccaagaagatggtccttcaatttcagaaagccctgtgctcaatattgagaatgaaaagtcatctattggcacttatgataaaacaagaaggaagaagactgcatcaaatacgcctcccatcactggggctatctacaaagagcacaaaccattagtgttgaagccagtctacataggaacggtacaatacaaaataaagatgttcaattcagttaaagaagagttaattcctctacaattttatgggacgttgccaaaaggttatgtaattaaggaaatacattacaggagaggaaaagattcatctattagtctagagccagatttgagcaatggtggttctaatatagttccccaaaggaaatttgcccagagcccagaagaagacaaagtaagagagcttgctccaccctggagaggtaccctctccaaagggtccaggacctcattgtttagtcacgaagagcaaaagaaaacgtatgccgattcctatttaaatgttccatcttcaacagaacacgcatttccctccagtgccagaaatgatacagctgatcaagaagaaaatctcagccttccacaaatgatgccacaacagccagctgatgaatcaaagacccacagaatggagccaccaagcactccagcaaccatggtccttgaaagagcaaaggaagaactggaacagaatgcacaaggaaaggaaagttcagaggatgatgcttcagtcttgacaggctcagctgatgatgtgcaacaggaaggcttggtttctgtcaaccattccatgccatgggaggcagagaaggagtctttagagacaggaccaccaagaccagcgccagccatccaagaaaagtttgagccagacatggaagggctagagccgatttcaacagaaaaaacagaacaagcgtctgaatacgttacctcatctgagcccatagtctacagagaggaggagcatgcgcctgagcccatagtccacagagaggaggagcatgcgcctgagcccatagttcaaagagaggaggagcatgcgcctgagcctgagtccatagtccacagagaggaggagcatgcgcctgagcccatagtccacagagaggaggagcatgcgcctgagcctgtgcccatagtccacagagaggaggagcatgtgcctgagcctgagtccatagtccacagaggggaggagcatgcgcctgagcccatagtccacagagataaggggcatgcactggagcccatagtccacagagaggaggagcatgcgcctgagcccatagtccacagagatgaggggcatgcaccggagcccatagttcacagagaggaggagcatgtgcctgagcctgagtccatagtccgcaaaggggaggagcatgcgcctgagcccatagtccacagagaggaggagcaagtgcctgagcctgagtccatagtccacagagaagaggagcatgcgcctgagcccatagtccacagagaggaggagcaagtccctgagcctgagtccatagtccacagagaggaggagcatgcgcctgaacccatggttcttagagaagagcatgcacctgagcccatagtccgcagagaggaggagcatgcgcctgagcccatagtccacagagaggaggagcatgcgcctgaacccatggttcatagaaaggcacaacaactagaaaggggagtggaaacttctacgccaatcacagatatcactgaacccgaagattctagtctagaagaagagatcatagaacttgattacccagaaagtcctttagcttctaaggagacttccccatcgcctttgtcccctgaagtagagcacagaaaagagcccattctaccaacacagatgacattcacacctgagcgtatcactttgtccgaggaagaaagagaggaaaacgagtctgtttctactgattctgcttttgtatctgagtattcagtcctacaggatttgaaccatacaccagagaagctggaagtagaggcagtttctgtatctgatgtgaaatctagcaatgaacctgcagtcttttcagaggacgacgaggaacgtgagtcttattccccagctatgacctctgtatctgagcagtccctttctccatccaccactgagaagacatctgccatccagtccccactcttttcaacagtttcaccagtcctgtctggagatgaggcctcagagaacgtgtgtcactcaccagaatctgaatctgcggctgagtattctgttccagcacatgcgcaagagttgctgttgaaaacaggtgaccacaagctcccattaaagtcccaacgtgtttctgagcccatcattcaggcagaagatgagaaagaagatattgggctacttcccccagcagcactgagccaggcagttctatcggaagacgagagtctaggaagtggaagtttcgcatcagattcaaagctgccatttaaaccctcggtttcacaaaatgcaacacgggaatccccccaaaaaacaatagatgacatgccccaattcaaaccaagaggcctttctgatcctgcaaccctgttagaagaagaaaaggaagccattggagttgggctatcttcatccaatgaggtctctgcagtggaatgcgctctccccccacaaaccactgagctgctttctgaaagccatgccccacctccctgggccatctcatccgaacaagtggtccaatcagaagaagggagcagagaccagcagcggggctcattctcttccacaccagagcttggccacacatctctgcttctaaagggtgcctcctcacccacaggtctatcagagcaagggcaggaagaggacaatattgggcccctttcccctgattctgcatttgcgtcagaattctcattctcaccctatccaactcaggaactagagaagagagagctggggcgggattctccactgtgcttaacgtccccctctgagcagactgttctgtctgaagaggacacggaagaggctgacctcttttctccggattcagcatcacaggtgtcaatcccaccataccgaatcgcagaaacagagcaaaacaaggttgagccagacgaattactacctacgaggtctgctccagactatccctacttctcagaggcagatgaagaagaggcggggtcctcagtggtcacgcttgtgcctgagcattctgagccatcgcaggagcgggaggagtcttccccttgtaggcctgtgttcgaagatctgagcctgccaccttcggcagataagaccggccaagcagaaactatgtcagatgttccaacaatttcaacctctgtatctgaatatctcatcctggcacggcaggcgaaaactcaggcatctttggagcccgaggctgaagatttggtaccaccaccaaccagtggatgggagaagagagatgcaaagagtagtctgccagcagttacaatagcagcttcctcttctgcactctcatcagtggtaaaggaagaaaccacatccgttttgcccacctctcagccctcagtttcacccgagtcaacctgtgtgcttaagccagagcaggagcccacagcacctctcactctaacaagtgcagatgaacagatggctttgcccagagtcggaagggaaaaagctgtgctggattctcaagaagcgacagcacacaaatcgcaggatcagacaccagagcctcggctcccaaatgttccagggtctgggatgaaatattcagttttgtctgacttgggagatgagccaaaggcggatgtcaaactcaatttagctccaactgtgacttctgaactagaacagagaatgttgtcaaagaatgagcctgaagtggcaaaaccacactcacctccagaggaaacatctatttctggacctaaggttttatctgcagtgaaaacggaagtgaaacaggagtccaaaataaccagggaacttcctgcggcttcatcggggagagagaggggagcggaacacagtccacctgtgccacctgcacttccagcattgacggaagagacggggaaagacacagaagccagctcttctgccaccacagtgccagtaactaagcttgattcaaattcaactaaattaggcagggatgaagtcctgacagatccatctcttgccagccctgtggaacacccaggcttaaagggaatagggaagagcgagttaggcagtggtttgcctttgcccagcatgtctgcctcagaggtgttaaggcctgaacccaaacttcctgtcaactcaggggttgaggtagagagagaagacaacgagccacctccattgcaagtgtcacccacatccaaacccacggtgccaaatgacaaacacgaggagataacaaggtctcctgattctgaaaatttagtttcagatgatttagctccaacattactggccttcagacatgagatgaacaggcaagcagaggagacatcttctccagtgccggggagtttcctgtcaggagagcaagagcttataaagctccccccagagcctgagaagcacaaacagttatcagaagtaccaactgctgggtcagaactcattgatagtagagatagagatagatccttaggtatagaaccagtaaaacccatcggaacggaaccagggccttctatcttagaaaagggccccgctgagcttcagagaagaggaaaagaacaagaagaaaacaggaagcttcctgtgcctgcctcagctccattagagactgcttcttttgacctccccattgagcaaaaagagcctaaacggacccttcatgagggccaagctgttgaggtgcctgatgagagcagctcttctgcagataagccagagctgggtgttaaacaattggcagagaagaaggagaatttggagcaacccaagccatttgtgacaactgagcgtgccagtgttacaggatcaaaagtgaaagagagtctcatttctccaaaggacaacatctggatgctggaaaagccagatggcttagtcaatcagcatgaagatagaaaaccaggaactgggcagctggagtcctctgagagcactgatctgatgtcagagaaacttggggctgcttcactggatacagatcacacatctgaaaccagaaaccaagaaacaagcaaagcaccagtgtctggtgagaagctatctcaggaacccagaagggttcagtcaaaggctgtagatgattctgaggaagggagaaagctagcctctggcaacgtggaagtactcacccaaagtaaatctgtccctgctgtgaaagcaaaagccacacctcaacctccagagaccccagaggtgacacaaaagccatctgagaagtcactcgtcactgagcaaggtcttcctgcagagaagggaaagaaaggcatttcatcttttaaatcatggatgtctagtttattgtttggatcaagcattccagatagtaaggtctctgacaacgaagatctagaaactcgtccaggtccctctgtagagaaagcagtacctgccatagagcctaaaggtacagttcctgctgaggttaatatagccgagaagccagcggttcattcattacctgaggtcacagttaaactggctgaggagcccaaaggcgtttcagttaaatccagcataagtcaagaccttaaagaaaaactcacatttttatcaaacgaagacgttttaaagcaacctaagtctaactctgaaaactatgggcagaaggaactgccaggcttctcagaaggaatgggcgaaagcttagctacttcagttggtgacaaacatcctggaattcatccttgttcccctatgggtgagaaagtgggtatggaagaagcccaaaacatggctcctcttcatattactgagagccaaagacgccagaagccagaggtctctcctccgtctatgtggaatatttctgcacgtaaggaagagccaagcagtgatcacaaggaaacatggctctcgtcatctgacgtagtagatagaatgccacagaagcccaaatcagcccagtccgccttcacaaggatgaactcagaggaaccagcatcaatgattctgccagtggaatcaaaaggcagtttaagtgatcttggtgaagacagacttagacaagaaatgccaaaacccacttctttggaacattgtgaagaggaagtggaacgtccaacagaggagaaggatggctgggaaactagatcattttccttggcagggaagaggggcctggcagagaagcaagaaatcatggctcccttggaactcagggaaaatgaagcagtaggagagttgcaaaggatgccggaatctcgacctttcaaattggaagaatcaaaagctgctgagaggcttgaacagcgcatctctccaactgaaaagctcatggaaaaacccagcaagactcttgctttggataggagagaaaaggaagtgcaggaatgggtattttcagaaggagagaagcaagaatacccccctgcagccatgcctgtgcctggagcatcagctgtttctttggataaggctcaaccacatttgctggctaaaccaacaccagttgttgaaaaaccagaacatatagtcacagaggtatacccagaaattagggagagaaaggcagcagaaacccaaccacatccccaggaagaaggtaaaactttagtagagaaaaccaaggtttcccgtgtggagtctccccatggagaggaaacggatggccattctcttactcaggaaggaaatctggagttggaaaagtcaggtgagagtagagtggatctcaaagaggaaaggaggcggttcgtgatgcccgagttgccccttggtgcttcagtggctgcggaagatggaagtgtgcagccaagacccctatctaaggatgctgctagggcatcagacatgactgatgaaacaaagcatttaggaacgccgccaactcagccgtcagctgtagaaccacaaactcttgttttaggaacttctgtagaacatgcagtgaagaaacaagaaacatggtcagacaggcccacagtccacactttccagacatctaaagacgacacagaagagatgctgaaacagtctgttcttatttcaaagcatcacttggaagctgtggaagatgtgcacagaaacgaaccgccctcttcagcagcaagtaactatgctcagtttatgcttagtgcatcagagatcagtgctgatggagttcctcctatgggaggcacagcccaggagcctgaaggcacctctgtgaaagatgaagaattttcagtaaccagcaagccagctggcctttcagaagatcagaagagtgcctttagcatcatttctgaaggctgcgagatattgaatatccatgcccctgccttcatcccttcagtggatcaggaagaaagtgaacaaatgcaagataagttacagtatttggaagagaaagcttcatttaaaagcatatctgttcatgatgagaagaaggccgctgcttcccataaaacacagaagagcaagttagaagttcctgataggaaaattacatcactgaaggaaaacaagacaaaggaaactcataagacaaaggaggagatagccacagactcaggaatgggtgatttcacacctatccaacccacagtttctggtgaagaggattattttgaaaaatatactttgattgattataacctctccccaggctcaggaaaacagaaatcaactgttgaggaatcttcagaggaagccaccaaaacactgacttctttcccagaaagttcagctgaacaggccctagaccatgaatataacttagtaaagttagacgagagcttttacgggccagaaaaggacgatagcaaattatctcatgcagagatgcaaaagtctttggctatccaaaaaccagatgacagaaatgctccaaagggtatcagtagagatgtggactccaggtctcctgggatgcctttatttgatgtggaggaaggagttctatcaaaaagacaaatatttcccaccacccccaaggctgtcaaccctgagctgctagaggagcccccagcactttccttcttctataaggatctgtatgaaggggcgtgtggggagaaaaatgaaggcgaaacagcttcagaaggtgacagtgtggactctgagacatcattcccaaggcgacattctgacactgatgatggaccaggtatgtattttgagaagtacatactcaaagacgacattcttcatgacgaatctgtaactcaagaagatcaaggccaaggcctggaagaaaagccagttggtgaagaggattcacagcaactgagagttgcagaaagagagatccggagaaagcctgaaactagtttttgggagaaaaatctggaagaacagcacaaagttgttggccgggaaggagaacccacaggccacatggagacccttgatgaggcggcaatgcagcagaaagctcccattacagagcaagtcagagcagtcacccagaagatgagctatgcagttccattccaggacacccgctgtgttctggagagtgagccaagcagccagggtaatgaggcaggaaatgcaagtccagatgtcaatctgaatgtccccgtacaagtgtctttcccagaagaagaatctgcagcaggtgccacctatgctcctgaagtattgcaagagaggctggtcccatctgtgtcccgggaagagaggctccacaatacccctgtgcaggatgagtatgactttgttggctctctgaatcaggaagcagccagtcaagccatcttaccagaagagccaggttcagaatcctcacccaaagaagtgttatctcaaggatcagaatcctttgagcacatcagggaacaggagctcacgagtgagggggaaccaagaatgtctgcttcacaggaagtgtgggacaggacagaagaccaatcagcaagagaatcagtgaccgctaagacacaaaaggaaccgaaaaagactcaggctgaatcttactgctacacctgcaaaagcctggtctctgaaatggacaaggcactggacattcacaaagaccacgaggtttcagcactcgacacggctataagtgctgttaaggttcaattaggagaatttcttgagaacctacaagaaaaatccttgaggattgaagcttttgttagtgagattgaatccttttttaataccattgaggaaaagtgtagcaaaaatgagaaacgactggaaatgcagaacgaggaaatgatgaagagggttttggcgcagtatgatgagaaagcacagagcttcgaggaagtgaagaagaagaagatggagttcctgcatgaccagatggtccacttcctgcagagcatggacacggctaaggacaccctagagactattgtgagagaggcggaggagcttgacgagacagttttcctggcttcctttgaggaaatcaatgaaaggctgctgtctgccatggagagcacagcttccttagagaacatgcctgccgcgttctcacttttcgaacactacgatgacagctcggcgcgaagtgaccagatgttgaaacaagtggctgttccacagcctcccagactagaaccccaggaaccaagctctgctaccagcacaacaattgcagtgtactggagcgtgaacaaggaggatgttgtggactcattccaggtatactgtgtagaggagcctcaggatgatcaagaaataaatgaactggtagaagaatatagattaacagtgaaggaaagttgctgcatatttgaagacttagaacccgatcgatgttaccaagtgtgggtgatggctgtcaacttcaccggatgtagcctgcccagtgaaagagcaatttttaggacagcaccgtccacacctgtgattcatgtagaagactgtactgtgtgttggaacactgccactgtcagatggcggcctgccaacccggaggccaccgagacctacactctggagtactgcagacagcactctcctgagggcgagggcctgagatctttctctggaattaaaggacaccagctcaaggttaacctccctcccaacgacaattacttcttctatgtgagagccaccaatgcctctgggacgagtgaacagagtgaagctgccctcatctccaccagaggaactagattcctcttattgagagaaacagctcacccagctctccagatctccgcgaacgggacggtgatcagcttctctgagaggagacggctgacggagatcccctcagtgctgggtgaggagctgcctgcctgcggccagcattactgggaaaccaccgtcgcagacagtccagcctatcgactcggcatctgcaccagctcagctgtgagggctggtgccctgggacaaggggagacctcatggtacatgcactgctctgagccacagagatacacatttttctacagtggcattgtgagtgaggtgcacgcaaccgagcgtccagccagagtgggcattctgctggactataccaaccagagacttctgtttataaacgccgagagtggacagctgctcttcatcgtgaggcacaggttcaacgagggcgtgcatcccgcctttgccttggagaagcctgggagatgtactctgcacctgggcttagagcccccagactctgtcaggcacaagtgatcctgggcattcagagtttatcagaatatgagcaagagttgggggtcagacctatcattctgtctctcaggcaatgtgcattatttagatagtctcccacacacctgcactgacgggagctccgggtgccgcagtcagcatgagagcagagccagggaccccgtgcctcatggagcagtgtgtgagtggaggggcggaaacacagccttcacccttggttcacagttggagttgtttcctaaagtcaaaggatttatacttgacctgaaccaaaccccgagaaaaggactgtgtctgctctgttggtcgaattccccagtggctaagtcagaggggggggagatgtgtccctggcacacctcttactaagggacgtcgacttttttcacaagaaaatgtcaccttacttcactagaggataatgaaccctagtcattagaggaaatgttttagctgatctaaatttacaatgaattcttttattatcacatgtgctgtagaatgtaagcctctcttctctgaaagtttaaatgtagaaaagtaatagatatcagagatttccattttgttaaataaatggctagcatcttataaaataaaaaaaaaaaaaaa

SEQ ID NO: 42 - DNA, 4094 bp, Mus musculus
gcgcgctcctcccccttcgtcccctcccgctcgactcgccgccgccgccgcaggagcagacgcctccggagccgcgcgcagccatggccgagaaccccggcttggagaaccaccgcatcaagagcttcaagaacaagggccgcgatgtggagacgatgcgaagacacagaaatgaagtgacagttgaactccggaagaacaaaagagacgaacacttactgaaaaagagaaatgttccccaagaagaaagcttagaagattcagatgttgatgctgattttaaagcacaaaatgtaacactagaagctatattacagaatgccacaagtgataatcctgtagtccagttgagtgctgtgcaggcagcaaggaaactattatccagtgacagaaatccaccaattgatgacctaataaaatctgggattttaccaattctagtcaaatgtctagaaagagatgataatccttcattacagtttgaagctgcttgggcactaactaatatagcatcgggaacttctgcacagactcaagctgttgtacagtctaatgcagtaccactttttctgcgactcctccattccccacatcagaatgtttgtgaacaagcggtgtgggctttgggaaacattataggtgatggtcctcaatgtagagattatgtcatatcactgggagttgtcaaacctcttctgtccttcatcaatccctccattcccatcaccttccttcggaacgtcacatgggtcattgtcaatctctgcaggaataaagaccccccaccgcctatggagacagttcaggagattttgccagctttgtgtgtgctcatctaccatacggacataaatattcttgtagacactgtttgggcgctgtcatacttgacagacgggggaaatgagcaaatacagatggttattgattcaggggttgtacccttcctcgtaccccttctgagccaccaggaagtcaaagttcaaactgcagcactcagagcggttgggaacatagtgactggcactgatgagcagacccaggtggttctcaactgtgatgtcctgtcccacttcccaaacctcttgtcacacccaaaagagaaaataaataaggaagcagtatggttcctttccaatataacagcaggcaatcagcagcaagttcaagctgtaatagatgctgggttaatccctatgattattcatcagctcgctaagggggactttggaacacaaaaggaagctgcttgggcaattagcaacttaacgataagtggcagaaaagatcaagttgaataccttgtacagcagaacgtaataccaccattctgtaacttactgtcagtaaaagattctcaagtggtgcaggtggttctagatggtcttaaaaacatcctgataatggctggtgatgaagcaagcacaatagctgagatcatagaagagtgtggaggtttggagaaaattgaagttttgcagcaacatgaaaatgaagacatatataaattagcatttgaaatcatagatcaatatttctctggtgatgatattgatgaagatcctagcctcattccagaagcaacacaaggaggtacttacaattttgacccaacagccaaccttcaaacaaaagaatttaatttctaaggtcaattaagtgcagcatctttcattcaatatgaaacaccaccagatggccaccaagcgataagacagcaagcaacagaaggctcccagcactcttgcctcttcattttgatgcttctaaagcaagccatgtctcagtcactttgcagttgccaaaagtcactctcacatggactgtaaatgcatatgcatgatttcctaaactgttttagaattctccttaaccatctcaactcccctatattttccatgttccctggtgccacatgctgacaactgcagtctccagttagaatattccatagtggtggtatatcagctgcccactgatacgcctttggaaaaaggtgcgctgtggatcaagacactttggtatgatgtatattcatgttggaagactacagaggtgcagtgtgatctgagcctccatcattgtcctccacaaacatattttcatattcttatgtggaagaattaaaagtacaagccaaatgattttcattggtgaaactgacacaaaagtaacttaaaaacaagaaacttggttgttgattaaaaagataagttttttaaaactgtacttcacctaccattaattgatgtgtttattatctgcctcagaagccagggttggaggaagagctttagatatcaatggtaatgctttcgccattatacctaattttttgagaacagcaaatcctatttgaccactcacttcagcctgtgtgttcctgctgttttgaataatcaaatgctgtgcatggtctctacctgagctgcaacctgttacagacttgaacttctgttaagttgaaagcaagagtccttgactacaaaaatacacaaataaataagtcaaaacaagaatggaaaaggtttaaatactgattggtaaggttttaagacaaagtcttgctttcagcttccaggggttaattttatttttgttttaatttgataattggatatggttgatttatattgggtttaaactgtggagctttcatgtttactgtaatttagtcttaaaatattttttacttagtaaccagtacttttgataatgtggtggcaacaaaccagcaactatctagaagtgttacaagacttcattcttgagtattggagttcattcagatctcactcaaagcatctgcacacattaaaagataaaccaaggatctgtgtagaggaatggtctgcagttatttaactcagcctgatttgcagtgatcttaagctctgcaaaatctggccttactatgtaaagtcattgcttatggcaaatggtctgacccagttattaatgaatgaatagggatttgaaattttttaaactaaataatttgtgctgtcacagaaatggttttgttgctcttgttcactgggtataatttcccaatgcattgatgtgaagggatagaaatctaaactaagatagttttcagatggggggtgtatttactgtgatgaagaagagacagatgccatcagagctttgtgaaacagctggggtgttttcactgataaacaacacatagcaggtgtgcttcattacaaatatatgtatctgccaaggtggagccactttaaagagtgagttttgtcttgtatctaaaatggatacaagcgtatgtttaaactgcaagatttttacttgctagagaatctgttttaatatagtggtttggcctctgattatttataggttttataaattttagaatcaatttctctttaaggtggctcagatttttcaactcttgtgcacataaaattgagttgaagttcattgtgccttttttctttacccaaattttgagttaaagcttcatatggtaactgcatcctgttcaaacacttgtctaaattttgaaactgtgtagtgttcactaaaagtaggagtaacaaagtcagaatgaattaaggtcacacactctggtgaaacccttaaagtcacaaccttcttgatagtgtgaattgtccccttccagttacttccttctggtctctccctacttaactgacagttaccttttaaattttgcacacattgagattaaaattgggcttctactgtgatgattcctatttcctctcgcgtcttaagtgcaaactaaccgttaagtaacgttggcatcaagtagtgcagactccgtgcctctgcttgagcggtttgccgtgacctgaccagttttgagttggaatcacaccatttcgtagataaggaaactgagtgtattgctgcacttttaagttttcaaaacagtgttttaaaattgcattgttttttttttttaaactcagtttaaaaaaagactaaaatgttctttcaaaagaggcatctaaacgtgttcctaattttgtatatgggcttaggttttgtaaccaataaaaaagctgctatcaaatatgataaaacattgaaagacttatttctgg

SEQ ID NO: 43 - DNA, 2780 bp, Mus musculus
cggagaccgttctgtgctccctccgcccgcaaccatggcaaagcccctgaccgaccaggagaagcgacggcagatcagcatccgaggcatcgtgggcgtagagaatgtggccgagctgaaaaagggtttcaaccgtcacctgcacttcactctggtcaaggaccgcaatgtggccaccccccgcgactactacttcgcccttgcgcacacagtgcgcgaccacctggtggggcgctggatccgtacacagcagcactactacgacaagtgtcccaagagggtgtattacctctctctggaattttacatgggccgaacattacagaacaccatgatcaaccttggcttacaaaatgcctgcgatgaggccatttaccagcttggattggacatggaagagttagaagaaattgaagaagatgccggccttggcaatggcggtcttgggaggcttgctgcctgcttcctggactccatggcaaccctgggacttgcagcctatggctacggcattcgttatgaatacggaatcttcaatcagaagatccgagagggatggcaggtagaagaggcagatgactggctcaggcatggaaacccttgggagaaggctcgccctgaattcatgctgcccgtgcatttctacggaagagtagagcacacccagacggggacaaagtgggtcgacacccaggtggtcctggctctgccttacgacacccccgtgcctggatatatgaacaacactgtgaacactatgcgcctctggtcggctcgagcaccaaatgactttaaccttcaagattttaatgttggagactacattcaggctgtgctggaccggaacctggctgagaatatctccagagtgctctaccccaatgataacttctttgaagggaaggagctgcggctgaaacaggagtactttgtggtggctgccaccctgcaggatgtcatccggcgcttcaaggcctccaagttcggctccaaggatggcgtgggaaccgtgtttgatgcctttccagatcaggtagccatccagctgaatgacacacatcctgcactcgccattccagagctgatgaggatttttgtggacattgaaaaactgccctgggccaaggcatgggagatcacgaagaagaccttcgcctacaccaaccacacggtgctcccggaggccctggagcgctggccggtggaactggtggagaagctgctgcctcgacacttggagatcatttatgagatcaatcagaaacatttagacagaattgtggccttgtttcctaaagacatcagccgcatgcggagaatgtctctcattgaggaggaaggaggcaaacggatcaacatggcccacctctgcatcgtgggctgccacgcggtgaacggtgtagcaaagatccactcggacatcgtgaagacccaagtattcaaggacttcagcgagctagaaccagacaagttccagaataaaaccaacgggattaccccgaggcgctggctcctactctgcaacccagggctggctgacttgatagcagagaaaattggagaggattatgtgaaagacctgagccagctgacgaagctccacagttttgtgagtgatgacatcttcctccgggaaatagccaaagtgaaacaggaaaataagctgaaattctcccagttcctggagaaggaatacaaggtgaagatcaacccatcctccatgtttgatgtccacgtgaagcggatccacgagtataaaaggcagcttctgaactgcctgcatgtgatcaccatgtacaatcgcatcaagaaagaccctaagaaattcttcgtgccaaggacagtcataattggtggcaaagctgccccaggatatcacatggccaaaatgatcataaagctgatcacctctgtggcagaagtggtgaacaatgaccccatggtcggcagcaagttgaaagtcatcttcttggagaactacagagtgtctcttgccgaaaaagtcattccagccacagacctatcggagcagatctccacggcaggcacggaagcctctgggacaggcaacatgaagttcatgctgaacggggccctgaccatcgggactatggatggggccaatgtggagatggcagaggaagctggggaggagaacctgttcatctttggcatgagagtagatgatgtggctgctttggataagaaggggtatgaggccaaagaatattacgaggcccttccagaactgaagttggtcatcgaccaaatcgacaatggcttcttttctcccaatcagccagacctcttcaaagacatcatcaacatgttattttatcatgacagatttaaagtctttgcagactacgaagcctatgtcaagtgtcaagaaaaagtcagtcagctgtatatgaatcaaaaagcctggaacacaatggtactcaaaaacatagctgcctcagggaagttctccagtgaccgaacaattaaggagtatgccaaggacatctggaacatggagccttcggatctgaagatttccctatccaacgagtccagcaatggggttagtgccaatgggaagtgaatgctaaaatgtactcttattcaatgacttcttatggaacttgagtattttagagcttccctgattctgtttttgtcattgaatagttaagtgtctccggggatgggaagggaaaatgtatgtctgtattagagctaaaaataaaatgtcaacttccagttgtcaatcaataaaaaaaaaaaaaaaaaaaaaa

SEQ ID NO: 44 - DNA, 1393 bp, Mus musculus
cgaggacgccgggccgggaagccgcggtgggatgcggctgacgcggacacggctgtgctccctcctcgtcgccctgtactgcctcttctccatctacgccgcctaccacgtcttcttcgggcgccgccgccggccgctgggcacgacctctcggaactccaggaaggcggcggcggcgcaggcgaaggagaggcgcggccgagagcagtccgctttggagagtgaagaatggaatccttgggaaggagatgaaaaaaacgagcagcgacacagagttaagaccaacctgcaaatcttaaacaaatccacgaaagaaaaaatagagcatagggtgcaaatctggggcaaagctgccattggtctgtatctctgggaacatatttttgaaggcactcttgatcctgctgatgtgactgctcagtggagggaaggacagtcagttgtaggaagaacgcattacagcttcatcacaggcccagctgtagttcctgggtacttctccatagatgtggacaatgtggttcttgttttaaatggaagagaaaaagcaaagatctttcatgccacccagtggttaatttatgcacagaatttaatgaaaacccaaaaactgcagcatctggctgttgtcttgcttggaaatgagcactgtgaaaatgactggataatgcagttcctcaaaagaaatggaggctttgtggatctgcttttcataacatatgacagcccctggattaatggtgcagacattctccagtggcctttaggtgtagcaacatataggcagtttcctgtagttgaagccagctggacaatgctgcatgatgagaggccctacatatgtaatttcttaggaactgcctatgaaaattcatcaagacaagcactaatgaacattttgaaacaagatggaaatgataaactttgttgggtttctgcaagagaacagtggcagcctcaggagacaaatgaaagccttaagaattaccaagatgctttgcttcacagtgatctcacattgtgccctgtaggagtgaacacggaatgttacaggatctatgaggcctgctcctttggctccattcctgtggtagaagatgtgatgacagctggtcactgtggaaacacaaccagtcagcacagtgctcctctgcagttactcaaggccatgggggcccccttcatcttcatcaagaactggaaggagcttcctgctattttagaaaaggagaagactataagcttacaagaaaagattcaaagaagaaaagtgttacttcattggtaccaacacttcaaaacagaactaaaatggaaatttactaaaattttagaaagttcattttttattaataataaagtttaattatgtctagtaaaaaaaaaaaaaaaa

SEQ ID NO: 45 - DNA, 669 bp, Mus musculus
atgctgctgctgctgctcgccgtcatcccctcacccccccacccccacccccaccgtgcactagcagtctcaaaacattcaaagtccaagatggcaaccctcaaggaccagctgattgtgaatcttcttaaagaagaacaggtcccccagaacaggattacagttgttgggattggtggcattggcatggcttgtgccatcagtatcttaacgaaggacttggcagatgagcttgctcttggtgatgtcatggaagacaagctaaagggagagatgatggatctccagcatggcagcctcttccttaaaacaccaaaaattgtctccagcaaagactgtagtgtgactgcaaacgccaagctggtcatcagcacagcgggggccatcagcaagagggggagagccgactccacctggtccatcgaacgtgaacatcttcagttcatcattcccaacattgtgaagtacagtccacactgcaagctgcttattgtctcaaatccagtggatatcttgacctatgtggcttggaaaatcagtggctttctcaaaagccaagtatgtccagtatgctctcagctactgcttcagtaccatccgtgcctgcctgctgccatgctcctcccttcccgcatggtagctatggacactaaccctctggacctgtga

SEQ ID NO: 46 - DNA, 1482 bp, Mus musculus
gttgaggaccagtggtgaggaacggccgaggcgggtctgagcgggtctccggagttcagcatgcgtgagtgtatctctatccacgtggggcaggcaggtgtccagatcggcaatgcctgctgggaactgtactgcctggaacatggcattcagcctgacggtcagatgccaagcgacaaaaccattggcggcggggacgactcattcaacacattcttcagtgagactggagccggcaagcacgtgcccagggcagtgtttgtggacctggagcccactgtggtggatgaggtccgcacgggaacctaccggcagctttttcacccagagcagctgatcactggaaaggaagatgcagccaataattatgccagaggccactacaccatcggcaaagagattgtcgacctggtcctggatcgaatccgaaagctggccgatctgtgcacgggactgcagggcttcctcatcttccacagctttggaggaggcacagggtctgggtttgcatcgctgctgatggagcggctttcagtggactatggcaagaagtccaagctggagtttgccatctacccagccccccaggtttctacagcggtcgtggagccttacaactccatcctgaccacgcacaccaccctggagcattccgactgtgctttcatggtggataacgaagccatctacgacatctgccggcgcaacctggatattgaacgtcccacatacaccaacctcaatcgtctgattgggcagattgtgtcgtccattacagcctccctgaggtttgatggcgccctgaatgtggacttaacagaattccagaccaacctggtgccataccctcgcatccacttcccactggcaacctacgccccggtcatctcagctgagaaggcataccatgagcagctgtcagtggcagagatcaccaatgcttgcttcgagccagccaatcagatggtcaagtgtgaccctcgccacggcaaatacatggcctgctgcatgttgtaccggggggatgtggttcccaaagatgtcaacgcggctattgcaaccataaagacaaagcgtaccatccagtttgtagattggtgtccgactggatttaaggtgggtattaactaccagcctcccactgtggtccctgggggagacctggccaaagtgcagcgggccgtgtgcatgctgagcaataccacggccatcgcagaggcctgggcccgcctggaccacaaatttgacctcatgtacgccaagcgagcctttgtgcattggtacgtgggagaaggcatggaggaaggggagttctccgaggcccgggaggacctggcagcgctggagaaggactatgaagaggtgggcgtggattccgtggaagcagaggcagaagaaggggaggagtactgagcgcatgggtctggctggcggccgtccatttatgtcttccccaccattggaaataaaggatatattatt

SEQ ID NO: 47 - DNA, 2053 bp, Mus musculus
aagacgtaatccctcacgggctgggaggcctgggcgttccgggagaccgaattgcggtgtgagccgccgtggggactgcgaagcgggcccggagtccgagatggagccgcccggaggtgcttgaggcgagcgggcggagcggctgcgacggactggtcacgtcagcggggacatggctcacctccggggcttcgcgcaccagcattctcgtgtggacccagaggaactcttcaccaagcttgaccgcattggcaaaggctcatttggggaggtgtacaaggggatcgacaaccacaccaaggaagtggtggccatcaagatcattgacttggaagaggccgaggatgaaattgaggacatccaacaggagatcactgtgctcagccaatgtgacagtccttatatcacccgctacttcggctcctacctgaagagcaccaagctgtggattatcatggagtacctgggtggtggctctgcactggacttgctgaaacctggtcccctggaagagacctatattgccaccatcttgcgggagatcctgaaaggcctggattatctgcactcagagcgcaagatccaccgagatatcaaagctgccaacgtgctgctctcggagcagggtgatgtgaagctggcagacttcggtgtggctgggcagctcacagacacacaaatcaagaggaacacatttgtgggtacacccttctggatggcacctgaggttatcaagcagtcggcctatgacttcaaggctgacatccggtccctgggcatcacagccattgagctggccaagggggagccgccaaactctgatctccaccctatgcgagtcctgttcctgattcccaagaacaacccacccacattggagggccaccacagcaaacccttcaaggagtttgtagaggcctgcctcaataaggacccacgattccgacccactgccaaggagctcctgaagcacaaattcatcacacgatacaccaagaagacctcctttctcactgaacttattgaccgatataagcgctggaagtctgaggggcatggagaggagtccagttctgaggattctgacattgatggcgaggctgaggatggggagcagggtcccatctggacgttccctccaaccatccggccaagtccacatagcaagctgcacaagggaactgctctgcacagctcacagaagcctgcagagcctatcaagagacagccaaggtcccagtgcttgtccacactagtccgtcctgtctttggagagctcaaagagaagcacaagcagagcggtgggagcgtgggtgccctggaggagctagagaatgccttcagcctggctgaggaatcctgtcctggcatctcagacaagctgatggtgcacctggtggagcgtgtgcagaggttctcacacagcaggaaccacctgacatctacccgctgaacaaccaactgaatgcactactcttcacagagagggagaagaatgctgtttgttttgagctgtaaaaggactgacttggaagccctcttgtgttgtgttacaactgtaaagactgaccagcctgtaggcttcacaagccaggttaccttctttctgccctacacagcagccccttgacacctgtgttcactccttggttgtctgaagctatgctaggcacctgggagcccttgcagaactgggcagcaacttgggaggctggtatgaccttctatatagactcctcagtccctgcagcaggtagaccaaggagcatagtaactattgggcagctttggctcttcgtctacaccagggacattgtcttgagggctcataggggcccaagatggtcatcatttgccttgtggtgtcagttcaggtactgtgtgttttcatgagtactcgaatcgtccagaatattttgggtttttttttttttttttaggaaaattgaacttcctgagtattctgacattaagtgttagttttaatagagcattgaaaaccctaccatttcaataaagacctggattggaaatgtaaaaaaaaaaaaaaaag

SEQ ID NO: 48 - DNA, 4130 bp, Mus musculus
cggggaccacgggagactgagtggagacggggtctttgccggccgaagcctagaccgcgggaggctgagccgcggaatgaagtggactctgaggccgccggaaccaggtgacgcgcgggaaccattggccacacgagcaagggagcgtttagaaggtttccgtaggcctggcgtccgagcttcccgtgtgtgcagtgggggattagggacgtggcaccatgaggagccgcagtaactcgggagtccgcctggacggctatgctcggctggtgcatcagaccatcctgtgccatcagaatccagtgacaggcttgcttccagccagctatgatcaaaaagatgcctgggtccgagataatgtgtacagtatcctggctgtgtggggtttgggcctggcatatcgcaaaaatgctgaccgtgatgaggacaaggcaaaggcctatgaactggagcagagtgtagtgaagttaatgaggggactgctgcactgcatgatcagacaggtggataaagtagagtccttcaagtacagtcagagtactcccgatagcctccatgccaagtacaacaccaaaacttgtgccactgtggtgggtgatgaccagtggggacacctgcagttggatgctacttctgtgtacctgctcttcctagcacaaatgactgcctcaggactccatatcatccacagcctagacgaagtcaattttatacagaacctcgtgttttacattgaagctgcatataaaactgctgactttgggatatgggaacgtggcgataagacaaaccaaggcatctcggaattgaatgcgagttcagttggaatggccaaggcagccctggaagcactagatgaattagacttgtttggtgtgaaaggtgggccacaatcagttatccatgtcctggctgatgaagtccaacactgccagtctatcctgaattcactactgcccagggcttcaacatccaaagaagttgatgccagtctgctctcagtggtctctttcccagcctttgctgtagaggacagccatttggtggagctcaccaaacaggagatcatcaccaagcttcagggtcgttatggttgctgtcgttttctgcgagatggatataaaactcctaaagaggatccccaacgcctatactataacccagctgagctgaagctatttgaaaacattgagtgcgaatggccattgttctggacatactttatccttgatgggatcttcagtggcaacgtagaacaggttcaagaatatagagaggctcttgatgcagtcctcatcaagggcaaaaatggagtccctcttcttccagagctgtacagtgtccctcctgacagggttgatgaagagtatcaaaatccccacactgtggatcgagtccctatgggaaaattgcctcacatgtggggtcagtctctatacattttaggaagcttgatggcagagggatttttagctcctggagaaattgatcccctgaatcgtaggttttctactgtgccaaagccagatgtggtggttcaagtctccattctggctgaaacagaagaaatcaaggccattttgaaggacaaaggaattgatgtggagaccattgctgaagtgtaccccataagagtacagccagctcgtattctcagccatatttattctagtctaggatgcaacagtagaatgaaactcagtggacgaccctacaggctcatgggtgtgcttggaacatcaaaactttatgacattcgcaaaactatctttactttcactccacagtttatagaccagcaacagttctacctggctctggacaaccagatgatagtagaaatgctcagaacagacctttcctacctctgtagccgctggaggatgacaggccagcccacgatcactttccctatctcgcacaccatgcttgatgaagatggaaccagcttgaattcaagtatcttggcagcactccgaaaaatgcaggatggctattttggtggggccaggatccaaacaggtaaattgtcagagtttttgacaacatcttgctgcacacacttaagcttcatggaccctggacctgagggtaagctgtacagtgaagattatgatgaagactatgaagatgatttggactctggcaactggatggacagctatgattcaacaagtaatgctcgctgtggtgatgaagttgcccgttatttagaccgccttttggcacacactgttccccatcctaaactagctcctacctcacggaagggagggctagatcggttccgagctgctgtgcaaacaacttgcgacttaatgtccttggtggccaaggccaaggagctgcatatacagaatgttcacatgtatattcctacaaagttatttcagccttctcgtccttcactcaacttacttgactcccctgagtctccacaagatagccaggttccttccgttcatgtagaagtgcatcttcctagggaccagtctggggaagtggacttccagtcattggtttcacagttgaaggagacctcaagcttacaggagcaagctgatatactctacatgctgtattcaatgaaaggacctgactggaacactgaattgtatgaagaagggggggctactgtcagagagcttcttagtgaactgtatgtcaaagttggtgaaattcggcactggggtctgatccgatatatctctgggatcttacggaagaaagtggaggcacttgatgaggcctgcacagaccttctgtcctaccagaaacacctgacagtaggacttcctccagaacctcgagagaagaccatctctgcgcctctaccgtacgaggcactcactaagctgatagatgaagccagtgaaggcgacatgagcatctcaacccttacacaggaaataatggtctatcttgccatgtatatgagaactcagcctggcctctttgcagaaatgttcagacttcgaatcggtttgatcatacaagttatggcaacagaactagcacactctcttcgatgttcagctgaggaagccacagagggcctgatgaatctcagtccttcagccatgaagaacctcctgcatcacattctcagtggcaaagagtttggagtggaacgaagcgttcgtcccactgattcaaatgtgagtcctgctatttccatccatgagattggtgctgttggagcaacaaaaactgaacgaactggaatcatgcagttaaaaagtgagataaagcaggtggaatttcgtaggctgtctgtctcgatggagagtcagactagtggtggtcatccctcgggtgtagatttgatgtcgccatcctttctgtcccctgcagcctgtattgctgcaagtagtggatcctttcctacggtgtgtgatcatcagacatctaaagatagtcgtcaaggccagtggcaacgcaggagaaggctagatggagcactaaatagagtaccaattggattttatcaaaaagtatggaaaattttgcagaaatgtcatgggctttctgtggaaggttttgttcttccctcttcaaccactagggagatgaccccaggtgagattaaattctctgtccatgtggagtctgtcctgaatcgtgtccctcagccagaataccgccaacttctggttgaagccatccttgttctcaccatgctggcagatattgaaattcatagcattgggagcatcattgctgtggagaaaatagttcatattgccaacgacttgttccttcaagaacagaaaaccctcggcgcagatgataccatgttggcaaaggatcctgcatctggcatctgtactctcctgtatgacagtgcacccagtggcagatttggcaccatgacctacctctccaaggcagctgccacctacgtgcaggagtttctgccacacagcctctgtgccatgcagtgagggctgtgggttctgcctgttagaacacttcagtagctagcccgtctggttgattgtgcatggaactgacatgttaacacctgatcactcccccaggcccttttcctgccccatccctccaggaagagagaactttgctgacgatctcactacttttgaagaaaagaagaaatatctggagacttg

SEQ ID NO: 49 - DNA, 3245 bp, Mus musculus
cgggcttgctgtggggcgtaaacctgcaggctggaagggctgttggctcggcgggagcctagggctacctactcggatctgtgttatcagattacactcacttgctcctgggaaggcgacgacgacatctagacgctgtcattggactccgcccggagcccgcagcttcgctcttggcagttttgacaggtgtcgccttgaaataaatggctcctgggcagaatcgagtggttgctcttgtagacatggactgcttttttgtacaagtggaacagcggcaaaatcctcatttgaggaataaaccttgtgcagttgtacagtacaaatcatggaaaggtggtggaattattgcagttagctatgaagcccgagcatttggtgtcactagaaacatgtgggcggatgatgctaagaagttatgtccagatcttctcctggcacaagttcgtgagtcccgtggaaaagctaacctcaccaagtaccgggaagctagtgttgaagtgatggagataatgtcttattttgctgtgattgaacgtgccagcatcgatgaggcttatatagatttgaccagtgctgtacaagaaagacttcaaaagttacaaggtcagcctatctcagcagatttgctgccaagcacttacattgaagggttgccccgaggccctacagtagaagagactgttcagaaagaggctattcggaaacaaggcttgcttcagtggcttgattctcttcagagtgatgatcccacctctccagacctcaggctgactgtgggagccatgattgtggaagaaatgagagcagccatagagagtaagactggcttccagtgttcagctggaatctcacacaataaggtcctggcaaacttgcttgtggactaaataagcccaaccgccaaaccctggtctcacatgggtcagtgccacagctcttcagccagatgccaatccgtaaaatccgaagtcttggaggaaagctaggggcttctgtcattgaagtccttgggatagaatacatgggtgacctgacccagttcactgaatcccagctccagagtcattttggagagaagaatgggtcttggctgtatgccatgtgtcgaggtattgaacacgatccagttaaacccaggcagttacctaaaactattggctgcagcaagaacttcccagggaaaacagctctggctactcgggagcaggtacagtggtggcttttgcagttagctctggaacttgaggagaggctaaccaaagatcgaaatgataatgaccgcgtggccactcagctggtcgtcagtattcgttttcagggagacaggcgtctcagcagcctgcggcggtgctgtgccctccctcgctatgacgctcacaagatgagccaggacgcatttgctgccatcaggaactgtaatacatctggaatccaaactgagtggtcccctcctctcacaatgctcttcctctgcgctaccaagttctctgcggctgcccctccagcttgcacggatatcactgcgttcctgagtagcgactcaagttgtcagccaaaggtgccaattgccagctctgagactaggacccaggggtctggcccagctgtaccaacctctaaagaggcagccacatctctagcgtctttttttcaaaaagctgccaaaaagcagagaatgaaagagacttcctttgtacctcttaacacagccacagagaagttatcatccaagccttcacttgtgttccaaagcagccaaaccacaggaagtcagtctttctttaagcagaagagcctgctgctccagcacacacagcttagtaactctgcggctcctgaccctccacaggccagccctgcagcgcaaccaagctgtctgccagcagagtgtgtagacagtggtcctgatgatggagcggtgaagccagtatcctctaaagcagtgtctacagaaatgaatgtggctggggacagtccaaacgtgctcgattctccagcttacaactctcaggaggtgacccaaagggccactgaggaccaagtgctctgtgagaagtgtgactccctggttccagtgtgggacatgccagaacacacggactaccattttgcattggagttgcagaagtcttttttgcagccttgtacttcaaaaccccaggctattcctgccgtgtctcctcagggcaaaagaaatcccaagagtccctcggcttccagtagtaagcgccttaggccccatggcatgcagacgctggaatcgttttttaagccactgacacattagtgctgcctggggcatcaggagggctctactattttttttctaacggatggaatcatgttgactgctcaaggggaatatgacatttctaatacaaagttaggggttttttcttccaatgggactctgatcctgttgctgatcaatgcttttcctctctagggagacagagtgtcataaaaggtataaagaacctggcaagctcacttgcttccctataaactaactaaagactaaacaggagtataactcaaaaaaactgtaaaagaaaggggaaatggggctggagatagagctcacttgtctaggacggcatgtgcaaggccccatgttcacttcccagttctggaaggaaaacgaggactattaagatgggcaagtgcaaacggccaaagtaatggatttagcagtctttttcagccatgcaggcttttctgataaattacatgactttgaattatgtatgaaaccaggtagtaggtttaatggataggaaaacagcatagatattttttcctacataaatacaaatcaacttttttttttttttttttttttttgggttttcgagacagagtttctctgtgtagctctggctgtcctggaactcactttgtagaccaggctggcctcgaactcagaaatccgcctgcctctgctgggattaaaggctcatcaacttacttataaattgggtctttgaaagatttgaaattcaccgcgtttagccggaaattaccctttcctttgactttagtgtgtagcttcttccctggctagatatgtagtttcttaaaagcaagaactcttgcagtgacttacatggaatatgttcttgatgttggttgaatgtatgtattaaattagccacattgagacaataaaaatgtactctttgaaaaaaaaaaaaggaaaaaaaaaaaaaaaaaaaaaaaaaaaaaaaaaaaaaaaaaaaaaa

SEQ ID NO: 50 - DNA, 1884 bp, Mus musculus
taagggttccctgtggctttgtgtatatgttccctgaaggtcatttgattacctattttattgaactgacttagcagggagtggaatccattccaaccattgcacgtggatttcccaaccacccctaagtagatatacctgtgagtggcaaactgacactaacgaagctttttgccttttgtacatttgagattttttttgtatatagtgttcgctgcaaggcctgtggagttaaatcattgactatagaggtatcaactgctgcatgttcaggcatattatagaactttagtctatgaaagaataactataataatgtccaggtgcaatctccttatcacctattggttcaagttgctgagagagaggtatgtttctttccagggagggctggggtccttcatattgtttatttccttttgggttaaaagtgtaagcacatagtgaactctgttaaagtcacgctcggttctcctgtgtagtgtcatgccctgagagagatggcagacgggaaagaatgttctcgatagtggtttccaagcttggacagtgactattttgagcccatactaaatgtgtccctatttgcatctggctggtcacagcctttgtctctaatgacgaccttcagttttcctctttgttttgctttttttttttaagaaaaactcaggtgtaactgtgatctgttcttatgatgattgcaaatattaaatgctatgctgtatcaatctgtatgtttggcataccagggaagtgatgaagaacattagattaatttaatttatcttcagtaacttgacatactgggggaagactatcttttggagtggaaaacaagcacagaaacatcttcatggtggtatcatctcaatgtttagaaaaaacataataatcccattatactcagatataatctctctttctctctctctctctttctctttccctctccctctccctcttcctccctccctccctcccttccttctactttctttaccattgtgaacattggacagccaaggccaatatcaagtgtttttcccccagggtttggtagtgttaatgttacagtgaaggctacacccttcctcatggccagttggcactgttgctgggaagtcaaacaacacattccaccagcaactctaagaagtcaggcccctgatacccttttggtgcccatagccctgctggctaggaggctttcagccaacgctttgaatctagtggagacctacacacgagtgtgttctttggatgtatactgagtcctgtcagcaagaacttagccacagggaatgtggtttggtggcagaactcttgcctggctggtgtgaagccttgtacatgggtcccagcatcacaaaaacagcagtggtggggatggccaagctggcaccagggtatctggggaatggccacactggcaccaggggatctgccaggtctatatttttccaactctcactttctttatcttaaaggaaaaaagtgggggggaaaaagccaaaaaatactacatgaaggatagtaattcctccctgcctctcattatggacttcttgaagtagaaacattttttttcctccaaaggtgaaaacaccattcattcttgctttaaaaataaaagaaggcttaaaaaaattacctctttttaaattatgtgcaaagtaattctggttaatagaaatgtattcaattttaggggttttattttgtattgtgaagctttcttttcctttccggatgtgattttaatcccttgccatctatcagtgtgatttcattgtaaacattattgtgccaaatgtactgtactcaaaaggatgtgaatgtgtattgttccagaacgtaataaatatgatgatgttaaatctt

SEQ ID NO: 51 - DNA, 924 bp, Mus musculus
ggcagaggctggagacacgcgttatgctccccctgtcccccatcgaagccatggtgggatcgggggagcatggcacggaagtctgaggaagtcaagagctgaatccctggtgcatactctctggcagaggctggagacacgcgttatgcaggggagcaaacctgggctctagctgggtgcagcccatgcagcaatgattcgtgcttggcagaaggtttacccgcatgcacctcacttaaagaagtttgcaccacactgcgtgtctgggccctcgggcttgctgggtgtagcatggcagcccaggactagtgggtccccattcccaggaggatggaagaaaagagtttccaggcccctccaagtttaggaaagaggaggtgatggcatccaagctgagctggaggaagctgctgatcctctttgacttcacgtctctggacctctcgggcttgggcatggaagccaggcaccctcccaggggagccttgaactggatattggggttcagcttccttttcttctaaatccatgggcaccctctcctctagagtcacactggctgctctcagcactgccggggcttggtggcttggttggaatcgctttttttactgagaggagcctgcggatgttcctgtacctgccggtgtaggcaggactttgcctctggttgggttttcctggattccagggaatgagggggtgggcggaggttcctcgggagtgacaggccctaggccttggttctgaggtcattgctctactctgggtgcagtccagccccgaggacgagcctgtgactgtcagagctatcagagctgtttgggggtggggggatgggttcaggatgccaagtctgtgccaaaataaatccgcatctgctcacaggttaaaaaaaaaaaaaaaaaaaaaaaaaaaaaaaaa

SEQ ID NO: 52 - DNA, 1114 bp, Mus musculus
gaattcgcccttgaattcaagatctcccgggtcaccgccaggatgaaacccatcctgctgcagggccatgagcggtccatcacgcagatcaagtataaccgcgaaggagacctcctcttcaccgtggccaaagaccctatcgtcaacgtgtggtactctgtcaatggggagaggctaggcacctacatgggccacactggagctgtgtggtgcgtggatgctgactgggacaccaagcatgtccttactggctcagctgacaacagctgtcgtctctgggactgtgaaacagggaagcagctggccctactcaagaccaactcagctgtccggacctgcggctttgactttgggggcaacatcatcatgttctccacagacaagcagatggggtatcagtgctttgtgagcttctttgatctgcgggatccaagccagatcgacagcaacgagccctacatgaagatcccctgtaatgattccaagatcaccagtgccgtctggggccccctcggggagtgcgtcatcgcaggccacgagagcggagagctcaaccagtatagcgccaagtctggagaggtgttggtgaacgtaaaggaacactctcggcagatcaatgacatccagttgtctagagacatgaccatgtttgtcactgcatctaaggacaacacagctaagctcttcgactccacgactcttgaacatcagaagactttccgaacagagcgtcctgtcaactcggctgctctctctcccaactatgaccatgtggtgctgggaggaggtcaggaagccatggatgtgaccacaacctccaccaggattggcaagtttgaggccaggttcttccatttggcttttgaggaagagtttggaagagtcaagggccactttggaccgatcaacagcgttgccttccatcctgatggcaagagctacagcagcggtggcgaagatggttacgtccgcatccactacttcgacccacagtactttgagttcgagtttgaggcctaagttctgggtctccatccacaacagagaagctgctcacagaagggtttagactgagaaataaattagtttggtaaaaataaaaaaaaaaaaaaaa

SEQ ID NO: 53 - DNA, 1018 bp, Mus musculus
tctcattcccaagatggcggacctactgggctccatcctgagctccatggagaaaccacccagcctcggtgaccaggagagtcggcgcaaggcccgagagcaggctgcccgtctgaagaaactacaagagcaagacaaacagcagaaagtggagtttcggaaaaggatggagaaagaggtgtctgatttcatccaggacagtggacaggtcaagaaaaagtttcagcctatgaacaagatagagcggagcatactacatgatgtggtagaggtggctggcctcacatccttctcctttggagaagatgatgactgtcgctatgtcatgatcttcaaaaaggagtttgcaccctcagatgaagagctagactcctaccgtcatggagaggagtgggacccccagaaggctgaggagaagcggaagctaaaggagctggctcagaagcaggaggaagaggcagcgcagcagggacctgcggttgtgagtcctgccagcgacaacaaggacaagtatagccatcttattggcaaaggagcagccaaagatgcagcccacatgctacaggccaacaagacctatggctgtgttcctgtggccaacaagcgggacacacggtccatagaggaggccatgaatgagatcagagccaagaaacgcctgcggcagagtggtgaagagttgccaactacctcctaggcatcccgcccaccttgctttgacctccagcaaggcaggggcatggagggacaaggctgctgctatcaggacccattctggagccccatttctaacctatgaggccctgccagctgtcactcaggctggaggagaagcaagtgtttatcactgctggaatttggatgtatggggtgtgtgtgtgtgtgtgtgtgtgtgtgtgtgtgtgtgtgtgtgtgtgtgtaaaaatgtgtatttaatctgtattattctctattacccttggaactttcttccccgtgggcctgggttgctttacattgaataaacactgtttgaccc

SEQ ID NO: 54 - DNA, 2456 bp, Mus musculus
ctcgagcactgttggcctactggattccagccaggccagagcaagctctccggtcagatctactgggcccaacttgcacctgcacatacacctccttgattgccctctccctaccttgagcttgccctttctgaagccatcatgtctgtgaccaagagtgccaggagtccgcaggtagccacccctctcaatctggaccttcctgagagtgccaagaagctgcagagccaggatcccagtccagcgaatgggacctcttcagagtcatcaaagaagaccaagggcataaccgggttccagacattggttcatctggtcaaaggcaacatgggcacagggatcctcggacttcccctggctgtgaagaatgcgggcatcttgatgggcccactcagcttgctggtaatgggcctcatcgcctgccactgtatgcacatcctagtcagatgtgcccagcgcttctgtcacagactgaacaagcctttcatggactatggggacacagtgatgcacggactggctttcagtcccaatgcctggctgcaaaaccacgcccactgggggaggcgtgtcgtgagcttcttcctcatcgtcacccagctgggtttctgctgtgtgtacattgtgtttctggcggacaatttaaaacaggtagtagaagctgttaacagcacaaccatcagctgccacaagaacgagacggtagctctgacgcccaccatggactctcgactctacatgctctccttcctgcccgttctggggcttctggtgttcgtcaggaacctgcgtgtcctcaccatcttctccctgctggccaacatcagcatgctggtcagcctggtcatcattgcccagtacatcatccaggaaattccagatgccagccagttgccactggtagcaagctggaagacctacccgctcttctttggaacagccattttttcatttgaaagcatcggtgtggtcctgcctctggaaaacaagatgaaggatgcccgcggcttcccaaccattctgtctttggggatgtccatcatcaccaccctgtacattgctatcggggctctgggctacctgcggtttggagatgacatcaaagccagcatcactcttaacctgcccaactgctggctgtaccaatcagtcaagctcctgtatgtcgtcggtatcctgtgtacctatgccctgcagttctacgtccctgcggaaatcatcatcccccttgctgtctctcaggtgtcaaaacgctgggcactgcccgtggacctgtctatccggcttgccctggtctgcctcacatgcatgctggccatcctcatcccacgcctggacctggtcctctccctggtgggctctgtgagcagcagcgccctggccctcatcatcccgcccctgctggaggtggtcacctactatggagagggcattagccccctgaccgtcaccaaggatgccctcatcagcatcctgggcttcatgggctttgtggtggggacctaccaggccctggatgagctgatcaagtccgggaactctcccgccctgtccaactccaccatgtttattcagtgacagagcctctcctcgcccacggtgacttatgttgtctatgaattttttcactttgccttttctctggtccaagacaggaaaaaacaaaacaaaacaaaaaacaggtgtagcatatccccagtaccgtgtgtgtgtgcgcgcgcgcgcaaaggagatgggggccatctacaccgcatacaaggtgtagatagatggtcattaaaaacaaaagaaatgttggtcgttctctagttttccacactgtggagacctcacctgtggaaaccgccatcttgtttttgtcatttatctgctaatttcctgccttgagtggagctatgcaaaaagcaaccactaggcggcagcaatagccagcttttggcagaaggtagtctctgcccgctgaggctttggttatttccttttcctgaccatgatggggaacactgtgctcaaggcagcatcaagatggagggggccagggccagtcacaatgctcagataaaatgtcaccatctatgttacagataagtgtgttgaactttctaaaccactaagtcttagcccaactcagaaatccagcagtgaacaagaaaaacatagggtcatgcctatgggccaggggcagcagacagagacatcattggagtcgtttttttacttctgaattcttgcaatgaacatcttctgttacctgtcgggcaccaagcataatacagggctcttatataatagtttgggtaaaggtgttataaaaacaagagcttatataacattgtagctttgtgtacccaacagtagagtctacgggtcatctcctgagtcttgaccttgtaacttgccatggtcaacagtaaaagtgttaccatatggagaaaaaaaaaaaaaaaaaaaaaaaa

SEQ ID NO: 55 - DNA, 3705 bp, Mus musculus
cgcgagctccagccgccgccggcagcagcagcctctgcgaacagagccgcggcggaagcgggcgcaggggagcgagcccggccccgccagcccagcccagcccagcccggcccagcccagcccagcccagccctgccgacaccctccccacacccgggcagcagccgccgtcgcctggagagaaggtggaggaagaaatccagctcctagcacgcacgcaccatcatggaccattatgattcccagcagaccaacgactacatgcagcctgaagaggactgggatcgggacctgctcctggatccggcctgggagaagcagcagaggaagacgttcacagcctggtgcaactcccacctgcgcaaagcggggacacagatcgagaacatcgaagaggacttccgagatggcctgaagctcatgctgctcctggaggtcatctcaggtgaacgcttggccaagccagagagaggcaagatgagagtgcacaagatctccaacgtcaacaaggccttggatttcatagccagcaaaggggtcaagctggtgtccatcggagctgaagaaattgtggatgggaatgtgaagatgaccctgggcatgatctggaccatcattctccgctttgccatccaggacatctccgtggaagagacttcagctaaagaagggttactcctgtggtgtcagaggaagacagccccatataaaaatgtcaacatccaaaacttccacatcagttggaaagatggtcttggtttctgtgccttgatccaccgacaccggcccgagttgattgactatggaaagcttcgaaaggatgatccactcacaaacctgaacacggcctttgatgtggcagagaggttcctggacatccctaagatgctggatgctgaagacatcgtcggaactgcccggccagatgagaaagccattatgacttatgtgtctagcttctatcatgccttctctggagcccagaaggcagaaacagcagccaatcgcatctgcaaagtgttggcggtcaatcaagagaacgagcagcttatggaagactatgagaagctggccagtgatctgttggagtggatccgccgcaccatcccatggctggagaatcgggtgcctgagaacaccatgcatgccatgcagcagaagctggaggacttccgagactatagacgcctgcacaagccgcccaaggtgcaggagaagtgccagctggagatcaactttaacacgctgcagaccaagctgcggctcagcaaccggcctgccttcatgccctccgagggcaggatggtctcggatatcaacaatgcctggggctgcctggaacaggccgagaagggctacgaggagtggctgctgaatgagatccggaggctagagaggttggaccacctggcagagaagttccggcagaaggcctccatccatgaagcctggacggatggcaaagaagccatgcttcggcagaaggattatgagacagccaccctgtccgagatcaaggccttgctcaagaagcacgaggcttttgagagtgatctggctgcccaccaggaccgcgtggagcagattgcggccattgcccaggagcttaatgagctggactactatgactcgccaagtgtcaacgctcgttgccaaaagatctgtgaccagtgggacaatctaggggctctcactcagaagcggagggaagctttagagcgaacagagaagctgctggaaaccatcgaccagctctacttagagtacgccaagagggctgcacccttcaacaattggatggagggagccatggaggacctgcaggacaccttcatcgtacataccatcgaggagatccagggactgaccacagcccatgagcagttcaaggccaccctcccggatgcagacaaggagcgcctcgccattctgggcatccacaatgaagtgtccaagatcgtccagacctatcatgtcaacatggcaggcaccaacccctatacaaccatcacgcctcaggagatcaatggcaaatgggaccatgtacggcagctagtgccccggagggaccaggctctcacagaggaacatgcaaggcagcagcacaatgagaggctacgcaaacagtttggcgcacaagccaatgtcattgggccctggatccagaccaagatggaggagattgggaggatttccattgagatgcacggcaccctggaggaccaactcagccacctgcggcagtatgagaagagcatcgtcaattacaagccaaagattgaccagctggagtgcgaccaccagctcatccaggaggcacttatctttgacaataagcacaccaactacaacatggagcatatccgtgtgggctgggagcagctgctcaccaccattgccaggaccatcaatgaagtggagaaccagatcttgacccgggatgccaaaggcatcagccaggaacagatgaacgaattccgcgcctctttcaaccactttgaccgggatcactccggcacgttgggtcccgaagagttcaaagcctgcctcatcagcttgggttatgatattggcaacgacccccagggagaggcagagtttgcccgaatcatgagcattgtagaccccaaccgcttgggggtagtgacgttccaggccttcatcgactttatgtcccgagagacggcagatactgatactgcagatcaggtcatggcttccttcaagatcctggctggagataagaattacatcacagaggatgagctgcgccgtgagctgccccctgaccaagccgagtactgcatcgcaagaatggccccctacgcgggccccgactccgtgcccggtgctttagactacatgtccttctccacggcactgtatggcgagagcgacctctaacccgcccctgcctccctccaccacccccccacccccggccttctgcgcgtgcgccccaccctgctcctcctcctcctccgcccagtctggctggctgggttcattattttcagctcagccaccaagggggcagagctccgacccaggcggcatcaagcctccctgcccacaaagtgacagtttacaaaattattttctgcaaaaaaggataaaaaaaaagttacgttaaaaaaaaattttaaaaagaaaaaaaaaaacaaacaaaaaactacatattttattataaaaaaaaaagtatttttttctccaccagtcttaaatggaaaagaggaaaaattaactatttgcaccgaaatgtttttgttgtgacataggaaaataaccaagcacaaagttatattccattctttttactgaagttttttcctcctacctgttctgtctgctgtattcatttctctaatttcatgcccacttgggggtggggtaggtgggtactctcatcagaggcacattggtgcatgtgtgtttgctagctcacttgtccatgagaatattttatgatattaaagaaaaccttttgaaatggctgcttttcaaagaagataattcatggcttctcatttttcagtctcttcaaaagtgtggctggcctgttttatgactgcagagttgttatgttttttaattttgaatattgcctattaaagataggacaaacttggagattatgatgttgcttggcacagactgtattaaaacaacactcccgtgaaaaaaaaaaataaaaaaaaaaaaaaa

SEQ ID NO: 56 - DNA, 625 bp, Mus musculus
ccccgcggttccggagcctagcgcccggcggcggccgcagccgctggacgaactcaagcgcttctttgaggctgcggcggaggacggcgctggcttgcagaggcagccagagaccggaggccggctgcaccccgccgttcaggacggctgtccggtactggggcagttgccaccgctcgttgccccgtcactgcagcaggaggtgcgacgagtgcgcgagcgcgagcgggagctgcagttgcagcggcgcagcatctacggcgacgccgaggtccaggagccagcgccgagcctcaccccgagcaggggagatggaaaattgtcggtgatctggcctccgcggagacgggcctctgagaaggagcgcagaccctgaggtctatgaaggttgggacctgcggacagaagtaacataccctttggagaaccagggtagggttactctccagatcagcagaaggcctagagagggaagggctagctttctttaatggcaacttgaaatccagcccatctttgatactgactatggaattaaccacctttctccataaaattctctagtcttccttggaaaccctgcaaaacctatgagtgaaacataaaataaactcctcctcccttc

SEQ ID NO: 57 - DNA, 2809 bp, Mus musculus
gcagcaagcagcaccatggctggcaagaaagtctgcattgtcggctctggcaactggggctcagccattgccaagatcgtgggtagcaatgcaggccggctggcacactttgacccacgggtgaccatgtgggtgtttgaggaagacatcgggggcagaaagctaactgagatcatcaacactcagcacgagaatgttaaatacctgccagggcacaagctgccccccaatgtggtggccatcccagacgtggtccaggctgcaacaggcgctgacatcctggtttttgtggtaccccatcagttcattggcaagatctgtgaccagctcaagggccacttgaaggccaatactattggcatatctcttattaagggggtagacgagggccccaacgggctgaagctcatttctgaagtgattggggagcgccttggcattcccatgagcgtgctgatgggggccaacattgccagcgaggtggctgaggagaagttctgtgagacgaccatcggctgcaaggacccggcccagggacagctcctgaaggacctgatgcagacacccaactttcgcatcactgtggtacaagaggtggacacagtggagatctgtggggccttgaagaatatagtggccgttggggctggcttctgtgatgggcttggcttcggtgacaacaccaaggcggcggtgatccggttggggctcatggagatgatcgccttcgccaagctcttctgcagtggcactgtgtcctcggccaccttcctggagagctgcggggtcgcagacctcatcacgacctgctatggggggcggaaccgcaaggtggcagaggcctttgctcgaactggaaagtccattgagcagctggagaaggagatgctaaatgggcagaagctacaggggccccagacagcccgggagctgcacagcattctccaacacaagggccttgtggacaagttccccttgttcactgcggtgtacaaagtgtgctatgagggccagccagtgggcgaattcatccgctgtctgcagaaccacccggaacacatgtgaatggggccagggcccaggacaggcagcccctttgccccaacggagacaagcggaaggaagcacgtgacacccgtcatcaggactgtctccaggactccccatctagcagagtcctctctgaaggaccctgaggacaggaggctgcggggctcagctacacacctagagatgctcgccacagaatccacacttccttgctgtcctctgggaagtgtagaactaagccccagtggtgcctgctccaggggtggggttgggggaagggaaggcgccaagtcaagggctgccggttgctgcctcacacacactgggaaccggtcccaagtcccattaagtgactgaagaagcacttcagccacaggaaagatggggcaaaggctgccaagggaagggtctggatgcctgagctgacacagaccccagagaccctttggccgacctctgccaggccccacacaacatcaacgatctcactgtttgctaacaaaatacaaagctctcaaacaaccccactctaacttctcctagcaacacttgcttcctcagaagcctctacttccccctcccccaggctactctggcacaagagttgctctccacaggcatctctggccctggggcgctccattcttcccagagacttcctggttcctggagctttgtcagggcctccccaccctgtgtgacctttcccagctttcccttgcctgcacccagctgccagcaccctctttggggagcaggaatctaatctgctgacagagctacactcttttcacagcaggctcagatggctcaggctcccctgaccttcctatttgtccacctccccagtcaggagctccggccccggccagcccctcctactgctgacctttcttctcagggtcctccccacaaggccgcttctctctgcagtcaccaccaacttcacgtctaacagaatgtaggatttatagtttatcgtcctcagggctgtcagcccatattcttgactctgccctttccttttgcccaagtcgttctcacccagcctggaaggccacccggcatctgtaggcttagaactaaggagcagctcaaaggttcagtaggtttccacaagggttggtgggtcctagtccaaggccagctgtcctcggaacagaacaaggtcctcgcgagatcggacccacacacctcaggagctggggaactcgagggaaggacaattgaaaactgcctgccctggggtgagggagatcagagggggatgggagactgctttgcactggccctgttccaaagttgggtggcagcaagagaatgtcacagatcagcagcctggagcgctagctataaatagctggaggtttctctctccaccaggggtctccatttcctgtgtggcagcaactgggacaccgtggctctggccagcttgatattaaactaacacattaaggtgccaggtccctctctgctcctagcctttaagaattccgtcttagtgaaggtcagagctgtcgggtaaggggaagagggggggccctgtcatcgatcccgactgggctggaaccctcccacgcatgactcaattcagagctgttccccgggagactggggcgggatgcagacagattccaacaccttaacctatgtttgctcagtcagtcaactgtgaatctgaggtcttctgtcaggccacttgtctacccaataaagtgtggtttttccagaaaaaaaaaaaaaaaaaaaaaaaaaa

SEQ ID NO: 58 - DNA, 4171 bp, Mus musculus
gctaggacggtctcccccccacccctccggccgctggccagcagctccgaggcgctcgtgcccgtcaccgcagccacctctccttgagacgcgcggaggcccgtggctcgcgacgcccccgcgcgtgggagggcgcggacgaggagcggccgagcccccgagaagccgggctccgagcgcgctcggcccgcagaggagcgcccgccgcacgggccgcgctggccccggccctcagcgccatgccctgtggagaagattggctgagccacccgctcgggatcgtgcaaggcttcttcgcacaaaatggagttaatcctgactgggagaagaaggttattgaatacttcaaggaaaagctgaaggaaaataatgctcctaaatgggtgccatcgctgaacgaagtgcccctccattatctgaagcccaacagctttgtcaagtttcgttgcatgattcaggatatgtttgaccctgagttttacatgggaatttatgagacagttaaccagaacacaaaagcacgcgttcttcattttggaaaatacagagatgtagcagaatgtgggcctcaacaagaacttgacttgagctctccaaggtctaccacttcggaaagacagaccttctactgtgtccccgtgcccggggagtcttcgtgggtcaaagaggcctatgtcaatgcgaaccaagctcgagtcagtccctcgacctcctacactcccagtaggcacaagaggagttatgaagatgacgaggacatggacctacagcccagtaaacagaaggagcagcatccaggctcccggcaagcaggaggcctcgggggccttcactggtgcggagagccaaaacgcttagaaactgaagcttcctctggacagcagctgaacaccttgaacctctcttccccgtttgatctgaactttcctctgccaggagaaaagggtcctgcctgccttgttaaggtctacgaagattgggattgcttcaaagtcaatgatgtccttgagttatacggtgtgctctctgtggatcctgtcctgagcgtactgaatagtgaggaaagggatgcctctgcactgctggaccccatggagtgcacagacatggctgaagagcagagagtgcacagcccacccgcttcactagtgccaagaattcatgtgattttagctcagaagttgcagcacatcaatccgttgttacccacttgccttaacaaggaggagagcagaagctgtcagtttgtgtccaatttcatgtctgagttgtctccagtcagagcagagctgcttggattcctcactcacgcactcttgggagatagtttggctgctgaatatcttatattgcatctcatctctacagtgtatacaagaagagatgtacttcctctaggaaaatttacagttaacctgagtggttgcccgcagaacagtaccttcacggaacacctctaccggatcatccaacatcttgtcccagcatcttttcgtctacagatgacaatagaaaacatgaaccagttgaagctcattccccacaaagactacacagccaaccgactggtcagtggcctccttcagctgcccaacaatacttccctggtcattgacgagactcttctggagcaagggcagttggacacgccaggtgttcataacgtaactgccctgagcaacctgataacctggcagaaggtggattacgacttcagctatcaccagatggagttcccatgcaatatcaatgttctcatcacatctgagggaaggtcactacttccggcagactgccagattcacctgcagccccagctgataccacccaacatggaggagtacatgaacggcctgctctcagctgtgctgccgtccgtgctcaacaagttccggatctacctgaccttgttgagattcctggattacaacctatcagacgacataaccaaggcggttgaagatgattttgtggaaatgcgtaaagatgaccctcagagcatcacggctgatgacctccaccagctgcttgtggtggctcgattcctgtctctgagcgtcggtcagacaacactctccagagagcgctggctcagagcaaagcagctggagctctccaggaaggcccggcttcagcagcagaagagtgtgaatgggaacgagctttagagcgccgagcgtgcagggaacggcaagctacggcctctgtgcgtgcagtccacagtcctttacaccacattgttttatagggaatttgtatccaaaaacacagtgacttttcctgaaatcaagtctggtgacacctaaagtttatatgattctctgtaagggtttttaccttactggttttatggagttttggagtttgttttataattagttatgatgtacaaaaatgtatttgatattaaaggtttaataatgataatgttgctgatcacaccattttcttagccacagctacatcttaggccagactatgaagtgccagcttcctctgcagagttatttgaagagctgtgttaattcagaacaggtctgagcgacaagttcgagatatgacttctgtagtgtcattttctacacagctgccacagacgcagtttcccacgtcccagctgtaccagccggcagaactggcctttcccagaacaggtggcggttcctggctttcagatttcatagactggtaatacctttctgaggtaggggtgccaattgattttgccaagtcatttgaaagaaaaaaagaacaaaacacactgtgatcactattttgttttcataaaggacattctcagaacacgagcatcttttaatggaataaatgcagctttgtgaagaccaccacattgtccttaacttttctcatctcctgcatctgtcatctgcaactgacatattatgggattgaggggaacactgccccatggaccctggtccagacatgaaaaaaatgctacttaaacagtcaagttttcggggtggggaaccatcttttttttttttttttttttttttttttttggggctgcttatcaaaccctggcttctcatacatgctagagaagtgtagtctccctggagctacatccccgggctgtgcagggtgggatgtttttcattttcctcattatttaactgacttgatgaatgtactgcattttgagcttttaatataagtaacaccatttactagtgcagtaaaggtccatccagttacaggtaggttttcctctgaccaattcattttgatatgtgtattttcaaatgaacaaaaatgttagtagttataatttgcaagttaatgtagtataatggcgattgtaacaagaaccttcagaaaagttagaaccttgctgttaatctcatctgctgtgtgtgaagatcaatcagtggtcccttagattcttccctgctaaccaaggaaacagggtcggccttgataaatcaagggagttgcctgatgaaaggaagtacaaactactagttgttcagcattcttttcctaactgcaaatctatttttataagttaatgtaaataatgttcatactagaattctaactggttttcatttttataacgggtagacagatcttccttaaacttttgaaaataaaatgttcacatagatttttgaaaatgcattttctttgtcctagaacaaattttttagttttatcttgtcaaactgtaccaatgtaaaccgtaatttaccaaagagaagtcataattttgcatggtcttacagaaaagttcccgtaaataaccctgtccagtaaataaaacttccaaattgccaggaccatgggccatttttcatgaattagaaatacaggagagcacctcctcaagctgaactggaagagacgggctctgcagctttctcagccacacacatgttcacttctgtagctctgcagctttctcagccaccgtctccccctcgccctcacacacatgttcacatctgtagctgggtctggatcagattgtaaccctgaccaggcagctaggtctctttggaaataaccattgctttaacttctgttgtcacatctcttcatgggtcatttctttggaaacccaaacatgcattatcttcccatctggcctggcttaatacttaactactctgaagaccctaaagaaaaaaaaaaaaaaaaaaaa

SEQ ID NO: 59 - DNA, 2998 bp, Mus musculus
attaagaaaaagaaaataggtaacttatttgcaaaaaaaaaaaaaaaaaatagtagggggggtccagatctcaatagtttttgttatgcacagccggggtctcctgggccctttaggctccccaaggctgttaggtgaggatctggctttccagcaccaaaaaaatcactgggctagcctaaccacatcagcagagccacttctgagtggactcggctttcacccgaacttgtgccctgccccaatatactgtaaatagctggagcaggcgcgatgcctggagaccttcccaggagctctcacctctctatttggccacttctgtgccctcaagcccaccataaagcctctctctggaccagctgtcgcccccaataccaccaaggtccctttttgctttggtccaggacagtatgttgtctaagaagccacggcatcctgcaaaaccttggctcagccctccactcttcaagatgagaccctgagggatcctgttgaaggcatagcaatcacaagctcccctcaatggaacccctgaatgctctcaacaccctccccaggctatgcagatggcagaagcagagcctggctagactctggcagctgcttggccaccctggacccgtttaacctgagctcctgcctggtcccatgaactgctatggatgtcaggacctaccaagtggccggtgagattatcttgctctgtgcccatgtgaccacagatgctctggtctggacccatgtttctgttgctctctggagctggcagggcactttaccatggcagcttgacagcttgacacagggcaaactgggcagggtgatcacttcagtagggcagcaaataggctgtgtgcaaggacctacaggagatggcaaagctgccccttttcactggaggggaaaacagacctaggacatccacatgtctgggcccaagagagccctgggatggggcagaaaggcaggcactgaccgggcatcttgcaccgagtcttcctggcttatcccatgctctaatacactccccgaggaaggggctgaggaatgctgatagcttgggaggccttagtatcggagtcttcttagggagacaacagaagtcccagcactgatgaaaaataagtttcttccatatctctaacccatatctactactgggggctaggagggtttcaaaagggctgggggtgcccgggagattgcatgctccctagccagaagtctctaattcatagctccccttggcttctttaccccatggctagatcccccctttccagactgctttggcctcaaagacacacctgagtgaactcacgggtacccaacttgtgggtgtgacccattggatgtcagggttctttcccaaaccaaacccattcccacctctaaactcctggacttgagctgggctgcaagcttagctgtgtctactctcactcctcagacagctgttctaggaggggggatgaataggggcctctgtagcttcctgggagtccccctgcctacagccagccagggcagcagagctcatgaaagggttgggagggctgtcctatgcaaattgctcgaatcggcaaacaattcgggtggtgctgagcttggcatggccactggtgtgtcgtgggttagggctggggaattgagaatagttttctgggtttgattttagaaaacccaagaaggttcttggaagtgtgcatatgtttggtaggcatggtagccaagaactctcctgaagtcccaaggctttcttaaaaagcctgggatgagaggtaccaaatccatcagttacctggaggcatggctcacctgcctccatctcctcctccccactcccaaggcctctgtcactgccaggcccctgcaggaacatccacggggtttcctaaaagctgaacagcttgtccctttcaccctgcaccccagcagcccctagggctggaggaaaatagggtcttacacatccccagacccatcttggaactctgttcccaggccaacaagttagcattagccaagcatacagtcagtgtcaaatgtttctcttctgtagctcgtagatacaacgcgtctgtggtcagggcccagccaagctaggccagtggccagctctgtgcagtacaaggctgtggtttggctcctttaaggagaaacgtacatggcttggaagaacacctggccatggtcagccttggtcacacctgactcccggccagtggcttctctctctcatgtctttcagcaaatccataatgctgggtctcctgccaccaaagtgtcagagtaatggccaaaagtcaggccctcagagatgcctcagtttccccatagtgagtatgtggtctgttgagatgacacctctgtgctctctaaggtaaacgggaggggaagtctctatttctacccacactgaaaggcaaaaccaaaaactcacagcagaatcacccagcacagagcaccaggtgtggtagtacatagaccacatacctagcaggctctgccacaccagtcggctggtggaaaccacctccgtatacaccggggacgcatcttgcttttccttcctctcctgttctccattctgatttattttctgcatgtttatttttgaaaatggacaaatgtgcagcagcccgcatgaccgtggttgtttcgggaaagataccggagtctgacgtgttcacactgcagctctgagcgccatgcggtgagacagacgttccgactttttttgtaatcgtcaacagcacaaatattttgtattgtcgtttgtatcattttgtacctaaaaaaaaaggaaaaaaaaaacaaaacaaaaacaaaacaaaaacaaaaagggaagagagttgatgttttcaatgtgtttttagtgccaggcagtcttggttccgaagggaacagcagctttgcggaattgtcgtgtccaggagtggagtcaggcgttagcacgctgctccaaaggagtaaataaagtcccctttgaagc

SEQ ID NO: 60 - DNA, 2069 bp, Mus musculus
ggaatcctcactggcgtctgcagcacggcgttaccgaggaccggctgctactggtagtttccttgcagatatactgctgttcttgaacatcatcccattgagaaccccagggtagttcagccaccagcatgtccaagcacaaacttattatactaagacatggagagggccaatggaataaggagaaccgattctgtagttgggtggaccagaaacttaacaacgacggactggaggaggctcggaactgtgggaggcagctcaaagctctcaacttcgagtttgatcttgtcttcacatccatccttaacaggtccattcacacagcctggctgatcctggaagagctggggcaggagtgggtgcctgtggagagctcctggcgtctgaatgagcgtcactatggagccttgattggcctcaacagggagaaaatggctttgaatcatggtgaagagcaggtaaggctctggaggagaagctacaacgtgaccccacctcctatagaggagtctcatccctacttccacgagatctacagtgaccggaggtacaaagtgtgcgatgtgcccttggatcaactgccacgttcagaaagcttgaaggatgttctggagagacttcttccctactggaaggaaaggattgctccggaaatcttaaagggcaaaagcattctgatatctgctcacgggaatagcagtagagctctcctgaaacatctggaaggtatctcagacgaggatattatcaacatcactctgcccactggagttccgattctgctggagttggatgagaacctgcgtgccgttgggcctcaccagttcctgggcaaccaggaggccatccaggcagccattaagaaagtggatgatcaagggaaagtgaaacaaggcaaacaataaagtgtggccaggaacgagtttggggtggcatgcagtgtgttccgagcgggcttctccccctcctccgacgggccccctctccctaagtctaggctgtgtggtagagtttgtgtaggtaactaggtaatttatcgtggcccagacgtgaccttcgaatgctgaagagctttgtctgaagcctgaatgaacttttctgctcctcccgtttgaattaactttgcaaagtagtagccagcggggggatttgaccagggtggttttgtgttttggagacaggagagtaacaagaggagatgaaattgtttatccttaacaagtcattgcagagtcaccactgacaggtgctattccagtgagcaggtcaccgttttattcaataatacttctcgagaagactactaggtagcacttgggcagtttagatcagaggcgcatcgaatggcagagtcacaggcgggtccgagggaaggcatctgagcgccacagtagcacaaggccctttgatgtctagcccagtgccatcctgtctgccgtcagtagaaaccaacttcagccagttagaaggaccagggtatgcacagtggtagcagtttatatccttctgtttcatttttaacttttgaactttaatctttggggacttcacagtttaaaataaagctttgtgactgcatacaacacgcgcaaggtgcctcgagtgtgtgatgaatttcagacgggcctctgagcttgtcctggccgccgtctcctgtagcactcctaaggttacattagttgagcacaacccacccctgaagtgaaggctggctgggggaagttgaccgtggtgcgtgtgattttattcacctgagcaggctgacagcctgtgagagcgtctgctgtatatctgctgttcctcggctaggtacaaaagattacagtccacatcctagtttaggtgggctgtgagcagaagtgaagtgtgttcaggtgctgtgtgacagctgccgtttctttaggctgttgcctccctgaaagcaagtcctcgatattccagtgacagtcatgcacacattttgcagacatagtacttacgatagatgttaccatcttttcatgctcttttccaggagtgggttaatttacttgtatccattttataataaaacgggcctttggtgg

SEQ ID NO: 61 - DNA, 2263 bp, Mus musculus
ccgcgcttcgctggctttctgctcatctagggtggcagcggctacctacctcagctctcgccctgctgccgccacggcctgggcgctgtccctcagctcccggagctcagcgcgaagccctggccccggcggccggggcatgggtcaggggcgcggcgtgaggcggctttctgcacggccgtgacgtgcattggcttcagcatgaagaccctcatcgccgcctactccggggtcctgcggggtgagcgtcgggcggaagctgcccgcagcgaaaacaagaataaaggatctgccctgtcacgcgaggggtctgggcgatggggcactggctccagcatcctctcagccctccaagacatcttctctgtcacctggctcaacagatctaaggtggaaaaacagctgcaggtcatctcagtactacaatgggtcctatccttcctggtgctaggagtggcctgcagtgtcatcctcatgtacaccttctgcacagactgctggctgatagctgtgctctacttcacctggctggcatttgactggaacacgcccaagaaaggtggcaggagatcgcagtgggtgcgaaactgggccgtgtggcgctacttccgagactactttcccatccagctggtgaagacacacaacctgctgaccaccaggaactatatctttggataccacccccatggcatcatgggcctgggtgccttctgtaacttcagcacagaggctactgaagtcagcaagaagtttcctggcataaggccctatttggctacgttggctggtaacttccggatgcctgtgcttcgcgagtacctgatgtctggaggcatctgccctgtcaaccgagacaccatagactacttgctctccaagaatgggagtggcaatgctatcatcatcgtggtgggaggtgcagctgagtccctgagctccatgcctggcaagaacgcagtcaccctgaagaaccgcaaaggctttgtgaagctggccctgcgccatggagctgatctggttcccacttattcctttggagagaatgaggtatacaagcaggtgatctttgaggagggttcctggggccgatgggtccagaagaagttccagaagtatattggtttcgccccctgcatcttccatggccgaggcctcttctcctctgacacctgggggctggtgccctactccaagcccatcaccaccgtcgtgggggagcccatcactgtccccaagctggagcacccgacccagaaagacatcgacctgtaccatgccatgtacatggaggccctggtgaagctctttgacaatcacaagaccaaatttggccttccagagactgaggtgctggaggtgaactgacccagcccgcgcgtgccagctcctgggagggacgactgcagatccttttctaccgagttctcgagtgcattttgttctgtaaatttggaagcgtcatgggtgtctgtgggttatttaaaagaaattataatttgttaaaccattgcaatgttagatgttttttaagaagggaagagtcagtattttaagctcacttctagtgtgtcctgctcaaggtggaggctgatatttatgggccttggtggtttcttacccaccccttctagcgttccccagacgacagacacttggccctggctagctgggcaagggcagtccttagtgactccagggattcttgagaggcagaggccatgtcccacccgtggctgcaggtcgggttcctcgtaccaaggggaggctgagggcacagctggccccacttggggagggtagataacatctggactgcccggcttgggtctctgctcctcaccctagccctcttctccaatctgagcctaccctggcctcctgtctcctggctagggacacggctgtcccacaggtgccgtcttgggttatctcgctgctgttggctggtttcactctggaggttggcaccatggacacagctcagcgttgctctggcgcatatcctcctgagccacaccccaagtctggtgtgaggaagggcttctcttctcttcacagaggtgcctggcttcttgtgcagcacactgggtccaggacaggaggacccccccaaaccaagcctcacgtgtgtgcctttatgaggcgttgggagaaagctaccctcctgtgtattctgttttctccatgagattgttgtgccatgtcacacttttgtatattcctagactaataaatggaaacaagaaaaaaaaaaaaaaaa

SEQ ID NO: 62 - DNA, 4143 bp, Mus musculus
gcaagctgggctcccctgctccgccgggaagcggctgcccctccctctggatcacacagggttcttgcagtaggtgacagcaggatcgggcaccagggaagcaattgattcgtctcttacccgcatcccagagttgcctacgctgcccagagagggagagaggaaagagaagaagggagagaaagaaagagacttacaaaaccttccatgtggagtagtctgggtgattcgctgcccaccgctgcagactctagctgcacttagttttcgcctctgacggggcatatctgctgttctttcaagccaagtcgctgggacttaacacctccccccccccccagcagggagttggcaagaatttggctcccgtattctgctgcaatcctctactgtcccggtgtgccagccttccaccatgactgacactgtggtgaaccgatggatgtaccctggtgatggccctctgcagtcaaatgacaaggaacagctgcaggcaggatggtccgtccatcctggagcacagaccgacaggcagaggaagcaggaagaactgacagacgaggagaaggagatcatcaacagagtgattgctcgggcagagaagatggaagccatggaacaggaacgcattgggcgcctggtggaccgtctggagaccatgaggaagaatgtggctggagatggcgtgaaccgctgcattctgtgtggggaacagctgggtatgctgggctcggcctgtgtcgtgtgtgaagactgtaagaagaatgtctgcaccaagtgtggggttgagacctccaacaaccgtccgcatccggtatggctctgcaagatctgccttgagcagagagaggtctggaagcgctcaggagcatggttcttcaaaggtttccccaagcaggtccttccacagcccatgcctataaagaagaccaagccccagcagcctgctggtgaaccggccacccaggagcagcctacacctgagtccaggcatccagccagggctccagctcgaggtgacatggaggacaggaggcccccagggcagaagccaggccctgacctcacctctgctcctgggagaggaagccatgggcctcccacgcgtagggcctctgaggcacggatgagtacagccgcccgggattctgagggctgggaccatgcccatggtgggggtactggagacaccagccgtagcccagcaggtttgaggcgagctaactcagtccaggcagcccgccctgccccagccccagtgccaagcccagcacctcctcagccggtgcagccagggccccctgggggcagcagggccactcctgggccaggacgctttccggagcagagcacagaggctcctccaagtgaccctggctatccaggggctgtcgccccagcccgagaggagaggacaggacctgcggggggcttccaggcagcgccgcacactgcagccccctattcccaggcagcccctgctcgccagccaccacctgcggaggaggaggaggaagaagccaatagttatgactctgatgaagcaaccacactgggtgccctggaattcagccttctctatgaccaagacaacagcaacctgcagtgcaccatcatcagggcgaagggactgaagcccatggattccaatggcttggcagatccctatgtgaagcttcatctgctgcctggagccagcaagtccaacaagcttcgtacaaagaccctgcgcaacactcggaaccctgtgtggaatgagacactgcagtatcatggcattacagaggaggacatgcagaggaagacactaaggatctccgtgtgtgacgaggacaagtttggccacaacgagttcattggtgagaccaggttctcgctcaagaagctgaaggctaaccagaggaaaaacttcaacatctgcctggagcgggtgatcccgatgaagagagcagggaccaccgggtcggcccgtggcatggctctctatgaggaggagcaggtagagcggatcggcgatatagaggaacggggcaagatcctggtgtccctcatgtacagcacgcagcagggcggcctcattgtgggaatcatccgctgtgtgcacctggccgccatggatgccaacggctactcagacccctttgtcaagctctggctgaaaccggacatggggaagaaagccaagcacaagactcagattaaaaagaagaccctgaatcccgagtttaacgaggagttcttttatgatatcaaacacagcgacctggctaaaaagtccctggatatctcggtgtgggactacgacattggcaagtctaatgattacatcggaggctgccagctggggatctcggccaaaggcgagcgcttgaaacattggtatgagtgtttgaagaacaaagacaagaagattgagcgctggcaccaactgcagaacgagaaccacgtgtccagtgattaggacctggtgccctggtgtcccctgtctctgccccagccgctctcccctttcagagcctcccctgccaactatgaacctttcatgtctcccccacttcaggtcctgctacagaagaagaatctctgggcttcagggtctggatgtgagccctctctggtccccagaggttgggtagtgggtgtggggagacatttacaaagagatttactctgaccttaagcatcttcaggtccccttgggcactggtgaacccataggttgtaaggaccaggaggagggcagaaattatacattgaggctgcctctgtccatccaaagcactccaggaagaaaaaaaaaaaggagagagagagagagagagagacagagagagacagagacagagacagagagacagagagagagagacagatagatacacacacccatcctctctaggcacaccaggaactagatacagagaatacacagagggcctgcccctcccccaccctttcaggaagctgtccattggcttcctagtaaaactaacttcctccttgctccttgctcatcttatcagtacctcctcacccaccctccctcccctcccctcttctcccacctccacagtgggggatgcaaggcagagcctccccatgtgccccttgccagcctggccagcaacctcccaagctggatgaagctgggccccacatctctgacattaacacatctcccattggcatggctggctatctttgagcctggggcccgcagctggcacagcctgggtgcatggcagcactatagatatcctgagaaacaggatctctctttctcatccctggctccccaaatgggcacaggtggcacggagctctgtgtatgaggggacttgctcctggaccccatgcttctatccttcctctactctttgcaaagagcaaaggaccctctccccaaacttccactcagagccacctctgttctgtctaccttccactctcttccccgtgattcctggtggtgatcaaataaccgtatttagagctttaattaggtcagaactctcttggtccatgacaaatccagaggaatgtacacctgaggctggagtcaggccatcttcctcacatgagaggcaagtctggtttttcccatcttgatagttttgccccatcaacatcacaaaccccactactccctatagcgtcaggcagaccaagactaaaaccctcccattcccaagtctcacagtcttgcttgttccttccaacatctcttgagatgcaccctgctctcagtaactcgtgctgttcctgagggactcttgtgtttccctgaaatgactctcttctagaatcaggctctgcctgccccaaggtggctaaccttcccacttccatggctcccctggttagtccctataggtctgatgctccgcccacttgcccacttccctgtcatggtcacctttaggagaaagcatgctggctgagtcgcccaagcctgatgctggttttggctctggactcggaatgcagcctgctcacagcgccctgatgccctccgtgacacacatacccacccctccacatagaacacaagtcccccggtgcatgcaccatgcccactgcctttctttgcactgatgtagccaaaaataaagtaggaatatccaaggaaaaaaaaaaaaaaaa

SEQ ID NO: 63 - DNA, 1166 bp, Mus musculus
aggtgatgccgagaatctcgctcatgggtctcaggaggagcggcaagtcgtctatccagaaagtcgtctttcacaaaatgtccccgagcgagacgctgttcttggagagcaccaacaggatctgccgggaagacgtctccaacagctccttcgtcaacttccagatttgggacttcccagggcagattgacttttttgaccctacctttgactatgagatgatcctccggggaaccggggcactgatcttcgtcatcgactcccaggatgactatatggaagcgctggcccggctccatctcacagtgaccagggcctacaaggtgaatactgatatcaactttgaggtgtttattcataaagtagatggtctgtcagatgaccacaaaattgaaacccagagagacattcaccagagggcaaacgatgacctcgctgatgctggattagaaaaaattcacctgagcttttacctgacaagcatatatgatcattcaatatttgaagcctttagcaaagtggttcagaaactgatcccacagctcccgacgctggagaatctgctgaacatctttatctcaaattctggaattgagaaagcgtttctgtttgacgtggtcagtaagatttatattgcaaccgacagcacgccggtggacatgcagacgtacgagctctgctgtgacatgattgacgtggtgatcgacatctcttgtatttatggtctcaaagaagatggagcaggagccccgtatgacaaggactcaacagccattataaagctgaataatacaacagttctttatttaaaagaggtcacaatgttcttggcgctcgtttgcttcgtcagagaggaaagctttgaaagaaaagggctgattgactataatttccactgcttccggaaggccatccatgaagtcttcgaggtgaggatgaagatggtgaaatctcgaaaggcccagagtcggctacccaagaagacaggagctactcccaatgggacccctagagtgctgctgtaggggaactgacaggagcctgagtccagacctcagtgaggaggctgttaaactatactgcactacaggagggctggggccctgactcgtatgtgttaagggaaaaaaaaaaaccttactctttaaaataaaatgagcactttg

SEQ ID NO: 64 - DNA, 2263 bp, Mus musculus; identical to SEQ ID NO: 61

SEQ ID NO: 65 - DNA, 3226 bp, Mus musculus
gatgactaaacctgacagaaacgctggtgggaggctcgggcgggcgccagtgcccgcgtaggtccttctcgacccgcagccaccacccgcccggtgaccatgatagtgtttgtcaggttcaactccagctatggcttcccagtggaggtcgattctgacaccagcatcttgcagctcaaggaagtggttgctaagcgacagggggttccagctgaccagctgcgtgtgatttttgccgggaaggagcttccgaatcacctgacggttcaaaactgtgacctggaacaacagagtattgtacacatagtacagagaccacggaggagaagtcatgaaacaaatgcatctggaggggacgaaccccagagcacctcagagggctccatatgggagtccaggagcttgacacgagtggacctgagcagccataccctgccggtggactctgtggggctggcggtcattctggacacagacagtaagagggattcagaagcagccagaggtccagttaaacccacctacaacagctttttcatctactgcaaaggcccctgccacaaggtccagcctggaaagctccgagttcagtgtggcacctgcaaacaagcaaccctcaccttggcccagggcccatcttgctgggacgatgtcttaattccaaaccggatgagtggtgagtgccagtctccagactgccctggaaccagagctgaatttttctttaaatgtggagcacacccaacctcagacaaggacacgtcggtagctttgaacctgatcaccagcaacaggcgcagcatcccttgcatagcgtgcacagatgtcaggagccctgtcctggtcttccagtgtaaccaccgtcacgtgatctgtttggactgtttccacttgtattgtgtcacaagactcaacgatcggcagtttgtccacgatgctcaacttggctactccctgccgtgtgtagctggctgtcccaactccctgattaaagagctccatcacttcaggatccttggagaagagcagtacactaggtaccagcagtatggggccgaggaatgcgtgctgcaaatgggaggtgtgctgtgcccccgtcctggctgtggagctggactgctacctgaacagggccagaggaaagtcacctgcgaagggggcaacggcctgggctgcgggtttgttttctgccgggactgtaaggaagcataccatgaaggggattgcgactcactgctcgaaccctcaggagccacttctcaggcctacagggtggacaaaagagccgctgagcaagctcgctgggaggaggcctccaaggaaaccatcaagaagaccaccaagccttgtcctcgctgcaacgtgccaattgaaaaaaacggaggatgtatgcacatgaagtgtcctcagccccagtgcaagctggagtggtgctggaactgtggctgtgagtggaaccgagcctgcatgggagatcactggtttgacgtgtagagagagatgtcacttggccctggacgcacaacctcaagggaaactccgaagattcctaccttccttagccatttcttcttctcgatgcatataagcacataaatgcgcacacacaaacacaggctgcagattacagaagcagcccctagatcctttctagggcacccacagaaaaccacagcacccgctggccccagggggaggaggcactttcagcctctggctcactcgaatgtcagagcttagatgagggtgcacctttggtttggattctgtagaagccatgagtgaggtgggaagtgttttccagggttgttgccacgccctgggtaagtaacacctctgaggattctcagaagcacacttgagatctgaggaacgctgctctcatgtagtaatcatctattcccaaagggccccctgcagtagtcaaaactatttgtttatccccccaaatcctatctttacaaatggtgctgatgagattacaacccctctgtgtactaatcagcttatcaaccaagtgagaacctaggaaagctaattggatggcagactgcttaaatcgcagggaggactcagaagccaaacctacttccgttcgtttcattatctgcaactttagaaagaaatgatctttttttccccctgaaaagataacaaagtctgcaatttggtttggagtattcctactgcagcctggaagtttagcttcactgtgaatttaacagagaaagtgcctataaagggggcgtttttaagagacaatcccatgatgctgcgccaatgctaacaacagggtcaagaaacacaatgtttatagaaggagcatccctcgaccatctgaatgagagtatgcctgaccccttccaccacaagtggggacacctctgcatatctgctccctcctctgctgttaagccccagggagccccatccacccagtggtcctacagacagggcaatacacacacaccaagatagccttcagatcaacatgcatcacactcaagtgttaatctttcaaggttttcttttctttttcctgttttttatttgttttgcttttgctttttttttttttttttttggtggtggtggggctaccaaacttgaggcctagagctaaaaatcatatagaaatgatgttatcttgtggtgtgaggaaaggccagctggcctaagttcacacttttgtcccagtggccctagactccacccagccagctcccaaaatgaaaagaccacctgtcaagcagcagtcaggagtctgatgtcacccatcactattttttttccatcattgtgcttgcctctgcctccttccacacccgtgtgacgtaatcgcattgggaagccaggacaatgtttgctgttctgctttgggtaaagggactccctgaagctctgtggctctccagtatggtcccttttccttcctaacagatgcatatgttttcttcagaatacaatagtgattcttaaaataacccaaaagacaggcatccacagtgtgtgagcatgaatcacagcctgcattgtgtgagtgtgaatagtgggataaaagtggatgtcagaagagtggaaatcaaacctctgcaaagcaatctttctctttctgtgaagtgtattaagaaatacctgaagtctgtgtgtgtggtggtacccagactgtcaatcaataaagacccagactgtcaatgaaaaaaaaaaaaaaaaaaaaaaaaaaaaa

SEQ ID NO: 66 - DNA, 6149 bp, Mus musculus
tgttgccaagtgtttggccctgacaaagaggagggagctgcagcatcagcacttctgttcctatataagcagggctgcccctcacaccctatctccgccaagagcccagagtgaaggacaggcgtgactctacgttttcatccagagctccatagctgaaacctcggctaaataagtagcagccatgagtgcgggttcggacgcggagatggctatttttggcgaagctgctccttacctccgaaaatcggagaaggagaggattgaggcccaaaataagccttttgacgcaaaaacatctgtctttgtggcggagcccaaggagtcttatgtgaaaagcgttatacaaagcaaggatggagggaaagtgaccgtgaagacggaaagtggagcaactctcaccgtcaaggaagatcaagtcttccccatgaaccctcccaaatatgacaagatcgaggacatggccatgatgacccacctccatgagcccggagtgctgtacaacctcaaagagcgttatgcagcctggatgatctatacctactcaggcctcttctgtgtcaccgtcaacccctacaagtggctgccggtgtacaaccctgaggtggtggcagcctaccgaggcaaaaagcgccaggaggccccaccccacatcttctccatctctgacaacgcctaccagttcatgctgacggatcgtgagaaccagtccatcctgatcaccggagaatccggggccgggaagactgtgaacacgaagcgtgtcatccagtactttgcaacaattgcagtcactggggacaagaagaaggaggagtctggcaaaatgcaggggaccctggaagatcaaatcatcagtgctaaccccctgctggaggcctttgggaacgccaagaccgtgaggaatgacaactcatctcgctttggcaagttcatcagaatccacttcggtaccacggggaaactggcatcagctgatattgaaacctatcttctagagaagtctagagtcactttccagctaaaagctgaaagaagttaccacattttttatcagatcacctccaataagaagccagagctaattgaaatgctcctgatcaccaccaacccgtatgactacgcctttgtcagtcagggggagatcacggtgcccagcattgatgaccaagaagagttgatggccacagatagtgccattgatatccttggcttttcacctgaagagaaagtgtccatctataaactcacaggggctgtgatgcattatgggaacatgaagttcaagcaaaagcagcgggaggagcaggctgagccagatggcactgaagtggctgacaaggctgcctatctccagtgtctgaactctgctgatctgctcaaagccctctgctatcccagggtcaaggttggcaatgaatatgtcaccaaaggccagacggttcaacaagtgtataatgcggtgggtgccctggccaaggctgtctatgagaagatgttcctgtggatggtcacccgcatcaaccagcagctggacaccaagcagccccggcagtacttcatcggggtcttggacatcgctggctttgagatctttgatttcaacagcctggagcagctgtgcatcaacttcaccaatgagaaactgcaacagtttttcaaccaccacatgttcgtgctggagcaggaggagtacaagaaggaaggcatcgagtggaccttcatcgacttcgggatggacctggcggcctgcatcgagctcattgagaagccactgggcatcttctccatcctggaagaagagtgcatgttccctaaggcgacagacacctccttcaagaacaagctgtacgaccaacatctgggaaaatccaacaacttccagaagcccaagcctaccaaaggcaaggccgaggcccacttctccctggtgcactatgcgggcactgtggattacaacatcaccggctggctggacaagaacaaggaccccctgaatgacaccgtggtggggctgtaccagaagtcagcaatgaaaactctggccagcctcttttccacatacgctagtgctgaagcagatggtggtgcaaagaaaggagctaagaagaagggctcttctttccaaactgtgtcagcccttttcagggaaaacttaaataaactgatgaccaatctgagaagtacacaccctcacttcgtacggtgtatcattcccaatgaaacgaagactcccggtgccatggagcacgaactggtcctgcaccagctgaggtgtaacggggtgctggagggcatccgcatctgcaggaaggggttccccagccggatcctgtatggggactttaagcagagatacaaggttttaaatgcaagtgctattccagagggacagttcatcgacagcaagaaggcctctgagaagcttctgggctctattgatatcgatcacactcagtataaatttggacacaccaaggttttcttcaaagctggtctcctgggtctcctggaagaaatgagagatgaaaagctggcccagattataacaagaacccaggcggtctgtaggggatacctaatgagagtggagtatcagaagatgctgctgagaagagaatccatcttctgtatccagtacaacgtccgcgccttcatgaacgtcaagcactggccctggatgaaactcttcttcaagatcaaacccctgctgaagagcgcagagaccgagaaggagatggccaccatgaaggaggagttccagaaaaccaaggatgagctggccaagtcggaggcaaagcggaaggagctggaggagaagatggtcactcttctcaaagagaaaaatgacctgcaactccaggttcaatctgaagcagacagcttggccgatgctgaggaaaggtgtgaacaattgatcaaaaacaaaatccagctggaggccaaaatcaaagaggtgaccgagagggccgaggacgaggaggagatcaacgcggagctcacggccaagaagaggaagctggaggacgagtgctcagagctgaagaaggacatcgatgaccttgagctgacactggccaaggttgagaaggagaagcacgccacggagaacaaggtgaaaaacctgacagaggagatggcaggcctggatgaaaatatcgccaagctgaccaaggagaagaaggccctccaggaggcccaccagcagaccctggatgacctgcaggcagaggaggacaaagtcaacaccctgaccaaagccaaaaccaagctggaacagcaagtggatgaccttgagggatcgctagagcaagaaaagaagctgaggatggacttagaaagagccaagaggaaactggagggggacctgaaactggcccaagagtccacaatggacatagaaaacgataaacagcagcttgatgagaaactcaaaaagaaggagtttgaaatcagcaacctgataagcaaaattgaagatgagcaagctgtggagatccagctgcagaagaagatcaaagagttgcaggcccgcatcgaggagctggaggaggaaatcgaggcagagcgggcctccagggccaaagcagagaagcagcgctctgacctctcccgggaactggaggagatcagcgagaggctggaagaagccggcggggccacctctgctcaggtggagatgaacaagaagcgggaaactgagtttcagaaacttcgccgggacctggaggaggccacgctgcagcacgaagccacagcagccgctcttcggaagaagcacgcggacagtgtggctgagctcggggagcagatcgacaacctgcagcgggtgaagcagaagctggagaaggagaagagcgagctgaagatggagatcgatgaccttagcagtaatgcagaggccatcgccaaagccaagggaaatctggagaagatgtgccgcactctggaggaccaggtgagtgaactgaagagcaaggaggaggagcagcagcggctcatcaacgagctgacagcgcagagagcacgcctgcagacagaagcaggtgagtactccagacagctggatgagaaagatgctttagtctctcagttgtcaaggagcaagcaggcatccacgcagcagattgaggagctgaagcgtcagctcgaggaagaaaccaaggccaagaacgcgctggcccacgccctgcagtcctcccgccacgactgtgatctgctgcgggaacagtatgaagaggagcaggaaggcaaagccgagctgcagagggcactgtccaaggccaacagcgaggtggcccagtggaggaccaaatatgagaccgatgccatccagcgcacagaggagctggaggaggccaagaagaagctggctcagcgtctgcaggcggccgaggagcacgtagaagccgtgaacgccaagtgcgcttccctggagaagacgaagcagcggctgcagaacgaggtggaggacctcatgattgatgtggagaggaccaacgcggcctgcgccgccctggacaagaagcagagaaacttcgacaaggttctatcagaatggagacagaagtatgaggaaactcaggctgagcttgagtcctgccagaaggagtcccgaactctcagcacggagctgttcaaggtgaagaacgcctacgaggagtctctggaccacctggagacgctgaggagagagaacaagaatctgcaacaggagatctctgacctgactgagcagattgcagagggagggaagcacatccatgagctggagaaaatcaagaagcaagtggaacaggagaagtgtgagatacaggctgccttagaggaagcagaggcatctctggagcacgaggagggaaagatcctgcgcatccagctggagctgaaccaagtcaagtctgagatcgacaggaagattgctgagaaggatgaggagatcgaccagctgaagaggaaccacgttagagtcgtggagaccatgcagagcacgctggatgccgagatcaggagcaggaatgatgctctgagagtcaagaagaagatggagggagacctgaacgagatggagatccagctgaaccacgccaaccgcttggctgctgaaagtttgaggaactacaggaacacacagggcatcctcaaggacacccagctgcatctggatgacgctctccggggccaggaggatctgaaggagcagctggccatcgtggagcgcagagccaacctgctgcaggctgagattgaggagctgcgggccacgctggagcagacggagaggagcaggaagattgcagagcaggagctgctggacgccagtgagcgcgtgcagctcctccacacccagaacacgagcctcatcaacaccaagaagaagctggaaaatgatgtttcacagctgcagagtgaagtggaagaagtgattcaagagtcacgcaatgcagaagagaaggctaagaaagccattactgatgccgccatgatggcggaggagctgaagaaggagcaggacaccagcgcccacctggagcggatgaagaagaacatggaacagacggtgaaggacctgcagcaccgtctggacgaggctgagcagctggcgctgaagggcggcaagaagcagatccagaaactggaggccagggtacgtgaacttgaaggagaggtcgaaaatgaacagaaacgcaatgctgaggctgttaaagggttaaggaagcatgaaagaagagtaaaggaacttacctaccagactgaggaagaccgcaagaatgtgctccggctgcaggacctggtggacaaattacaggcgaaggtgaaatcctacaagagacaggctgaggaggctgaggaacaatccaatgccaacctggccaagttccgcaagctgcagcacgagctggaggaagccgaggagcgggctgacatcgccgagtcccaggtcaacaagctgcgggtgaagagccgggaggttcacaccaaaatcagcgcagagtaaacacatcttgcagaggaaggaggctgccaaggggctgaaggaaagcacaggaggggctgctttgggtcgcttgctgggtcacttgcctctctgggtttacttttctcctactgctgactaaataaaaactacaaggcattggtaaatcaaa

SEQ ID NO: 67 - DNA, 1415 bp, Mus musculus
gggtcaccaccacctccacagcacagacagacactcaggagccagccagccagggtcccaaaggccgccaccatgccgttcggcaacacccacaacaagttcaagctgaactacaagcctcaggaggagtacccagacctcagcaagcacaacaatcacatggccaaggtgctgacccctgacctctacaataagcttcgcgataaggagacaccatctggcttcactctggacgatgtcatccagactggggtggacaacccaggtcaccccttcatcatgacggtgggctgtgtggccggcgatgaggagtcctacacggtcttcaaggacctgtttgatcccatcatccaggaccgccatggcggctacaaacccacagacaagcataagaccgacctcaaccacgagaacctcaagggtggagacgacctggaccccaactatgtgctgagcagccgcgtgcgcactggccgcagcatcaagggttacactctgcctccgcactgctcccgtggagagcgccgtgcagtggagaagctgtccgtggaagctctcaacagcctgacgggcgagttcaagggcaagtactaccctctgaagagcatgacggagcaggaacagcagcagctcattgatgaccacttcctgtttgacaagcccgtgtcacctctgctgctggcctcaggcatggcccgagactggcccgatgcccgtggcatctggcacaacgacaacaaaagcttccttgtgtgggtgaacgaggaggaccacctccgcgtgatctccatggagaagggaggcaatatgaaggaggttttccgccgcttctgcgtgggcctgcagaagattgaggagatcttcaagaaggctggtcaccccttcatgtggaacgagcacctgggctacgtgctcacctgcccctccaacctgggcaccgggctgcgcggaggcgtgcacgtgaagctggcgaacctgagcaagcaccccaagtttgaggagattctcactcgccttcgtctgcagaagcgcggcacaggtggcgtggacacggctgcggtgggcgccgtgttcgacatctccaacgccgatcggctgggctcatccgaagtcgaacaggtgcagctggtggtggatggcgtgaagcttatggtggagatggagaagaagctggaaaagggccagtccatcgacgacatgatccccgcgcagaagtaggcgcagggcgtggcgcaccagcctgcagtgtgcgctggtgccccgcctcctggaagtccaatcattgggctctgtcctctgggttctggccaatgagaacctgcctctccggagccccgcccacctgcttctcaggcgctccggagcgccggctgcttctccatgccctgccttaaataaaagtccgtgatggcctt

SEQ ID NO: 68 - DNA, 4966 bp, Mus musculus
ggtgcgctccggccgctccgggacgggcaggcgcgtggggtccacggctatcatcagctcagcgccctcagtgagatgcccgcccgcgccacgcgcagaggccgaggctaagcgttttcagtcctcagaggcggcggctctcggcgtgcgcccgagctctgaaggcgactctcagcgcggcgggaaggacgagcagcggcggccgggcactcactgcgggactccacagagttcgccgcgcgcggggctcggcccggatgggcgcgggggtggcggtccccgcagggtgctgcgaagcggcccgggcagagcgtgccggctgagcgccgcggccccggagccgactggagtcgggcgtccatgtcccggcgcggagcctagctccgagcgcagcccgcgcccgcggccgcccgcacctcgcagccctcgctccccggcttcgcggcgcgttccagacaagatggcgcggcccggtccgggagtgctcggagccccgcgccttgcgcctcgccttctgctctggctgctcttgctgctactgcaatggccggagtcagcgggcgcccaggctggcccgcgggccccctgcgcggccgcctgcacttgcgccggggactcgctggactgcagtgggcgcgggctggcgacgctgccccgggacctgccctcctggacgcgcagcctaaacctgagttataacagactctccgagatcgactctgctgcttttgaggacttgacgaatctgcaggaagtgtacctcaacagcaatgagctgacagccataccatcactgggcgctgcttccataggagttgtctctctctttttgcagcacaacaagatccttagtgtggatgggagccagctgaagtcgtacctgtccttggaagtgctggatctgagttccaacaacatcacggaaattcggagctcctgtttcccgaacggcctgcgtataagggaactcaacttggcgagcaaccgcatcagcatcctggagtctggagcatttgatggtctgtcgcggtcactgctgactctccgtctgagcaaaaacaggatcacccagcttcctgtgaaagcgttcaagctacccaggctgacacaactagacctgaatcggaatcggattcggctgattgaaggcctcacgttccaggggctcgacagcttagaggtgctgaggcttcagaggaacaacatcagcaggctgacggacggggccttctgggggctgtctaagatgcacgtgctgcacctggagtacaacagtctggtggaagtgaacagtggctccctctatggcctcacagccctgcaccagctgcacctcagcaacaactccatctctcgaattcagcgtgatggctggagcttctgccaaaagctgcatgagttgattctgtccttcaacaacctcacgcggctggatgaggagagtctagcggagttgagcagcctcagtatcctgcgcctcagtcacaacgccatcagtcacattgctgaaggcgccttcaagggactcaagagtctgcgggtcttggacctggaccataacgagatctcgggtacaatcgaggataccagtggtgcctttacggggcttgacaacctcagcaagctgactctgtttggaaacaagatcaaatctgtggctaagagagccttctcgggcctggaaagcctggaacacctgaaccttggagagaatgcaatcaggtctgtccagtttgatgcctttgcaaagatgaagaaccttaaagagctctacatcagcagtgagagcttcctgtgtgactgccagctcaagtggctgcccccatggctaatgggtaggatgctgcaggcctttgtgacagccacctgtgcccatccagagtcgctgaagggccagagcattttctcagtgctgccagacagctttgtgtgtgatgactttccaaagccacagatcatcacccagcctgagacgaccatggctgtggtgggcaaggacatccgtttcacatgctccgcagccagcagcagcagctcaccaatgaccttcgcctggaagaaggacaatgaggtcctggccaatgcagacatggagaactttgcccacgtccgtgcacaggacggcgaagtgatggagtataccactatcctgcacctccgtcacgtcacctttgggcacgagggccgctaccagtgtatcatcacaaaccactttggctccacatactcccacaaagccaggctcactgtgaatgtgttgccatcattcactaaaataccccatgacattgccatccggactggcaccacagcccgcctcgagtgtgctgccacgggccaccctaaccctcagattgcctggcagaaggatggaggcaccgatttcccggcagctcgtgagcgacgcatgcatgttatgccagacgatgatgtgttcttcatcactgatgtgaaaatagacgacatgggggtctacagctgcactgcccagaactcggcaggctcggtttcagccaacgctaccctcacagtcttagaaactccatccttggcagtgcctctggaagaccgtgtggtaactgtgggagaaacagtggccttccagtgcaaagcaaccgggagccccacaccacgcatcacctggcttaagggaggtcgcccattgagcctcacagagcgccaccatttcactccaggcaaccagctgctggttgttcagaatgtgatgatagacgatgcagggcggtatacctgtgagatgtctaatcccctgggcactgagcgagcacatagccagctgagcattttacctacccctggctgccggaaggatgggaccaccgtaggcatcttcaccattgctgtggtgtgcagtattgtcctgacctcgctggtgtgggtgtgcatcatctaccagaccaggaagaagagcgaggagtacagcgtcactaacacagatgaaaccattgtgcctccagatgttccaagctacctctcctctcagggaaccctttctgaccggcaggaaactgtggtcaggactgagggtggtcatcaggccaatgggcacattgaaagcaatggtgtgtgtctgagagacccgagcctcttcccagaggtcgacattcatagcactacatgcaggcagcccaagctgtgtgttggatacactagagagccctggaaggtgacggagaaagccgacaggacagctgccccacatacaacagcacacagtggctctgctgtatgtagtgactgcagtactgacacagcctaccatccccagcctgtgcccagagacagtgggcagccaggcacagcgagcagccaagagctcaggcagcatgaccgggaatattctccacaccatccttacagtgggactgcggatgggtctcataccctctctggggggtccctctatccaagcaaccatgacagaatactgccatccttgaagaacaaggcggcgtctgcagatgggaacggagattcctcttggactttagcaaagttacatgaagcagactgcatagacctaaagccttctcctacgttagcttcaggcagcccagagctcatggaagacgccatatctactgaagcccagcacttgcttgtttccaatggccacctccccaaggcctgtgactccagccctgaatctgtgccactgaaagggcagatcactgggaaacggaggggaccactgctattggcaccgagaagctaggcttcatctacctcagctcttttaaagcagtcgctacaggaaagaggtaggagaggccgtggaaagcttgtgtccagacgtcactccggacagtccgacttccgtgtggaatgtcagtcagtcggctagaggagtggcatctggagctcagaaacgtgagagactatttgtgtacaaaaggcaggaaaaagtatttgataccactgtacataagagttttcagagatttcatatatattatatatcttttacagagactattttaatccttagcgcatgggtcccgcttttggtgatattttcacattaggttgctgtctaattttggagagggtcaggaatcgttctggtgccttaatgcacagctggaattcaggtaaacacatcagctgttgctggcggttggaaaggagggcatcttggctgtgtggcacttagtggtcagattcgagtgcactggccagacctatgcaggcgtggtgttggcagcctcactgtagagcagggtgcacgggtctgtagttgaggacgagattgagagctgttaatccaccaaatgcaatggctcagaacaattaagcactgcctttcgtctttctttgtaactcacttggtaaaagcaaatgtcttgtctccttcagtggttctttgaagcttagtgaggcggaggctgccagtgttggtacctgtggattttccaatagtgagggttagctctgcctccagggcccgctaagttctgctgagcaggcctgtccacgctgttccttaccggtgagactgggcttggactgtacaagacttgagtcctagacctgggtgtatttgcactttggggccctgttgctagccatcttgtgagtgccaatgtataatgcagtaaagactacatggaaacacaaactcagtccttaaaaccccaggagttgaggggaagtgttggcacagtgatggcctgtgtcaccgtgtagtgtcataggccatcactgtgccagagcaagcacgctgagaaggctagtctccatagttgatggttaatgttacttccacaaaatatgtgaatttgctgcttctgagaggcaatgtgaaagaggaagtattactttttatgtacagagttatttatttatagaaattttggtacagtgtacattgaaaacatgtaaaatattgaagtgtctaacaaatggcataaagtgtctttaataaaggttcatttataaatactaa

SEQ ID NO: 69 - DNA, 3129 bp, Mus musculus
cgccgggcggcttggggggccgccgcccgccggactccgcgtccgccccgccaccggtgccagccatggagccccgagccccccgccgccgacacacccaccagcgcggctacctgctgacgcgggacccgcatctcaacaaggacttggcttttactctggaagagagacagcagttgaacattcatggattgttgccgccctgcatcatcagccaggagctccaggtccttagaataattaagaatttcgaacgactgaactctgacttcgacaggtatctcctgttaatggacctgcaagacagaaatgagaagctcttctacagcgtgctcatgtctgatgttgaaaagttcatgcctattgtttacacccccaccgtgggcctcgcatgccagcagtacagtttggcattccggaagccaagaggcctctttattagtatccatgacaaagggcacattgcttcagttcttaatgcatggccagaggatgtcgtcaaggctattgtggtaactgatggagagcgcatccttggcttgggagaccttggctgtaatgggatgggcatccctgtgggtaaactggccctttacacggcatgtggaggggtgaacccacaacagtgtctacccatcactttggatgtgggaacagaaaatgaggagttacttaaggatccactgtacatcgggctgcggcaccggcgagtcagaggccctgagtatgacgccttcctggatgagttcatggaggcagcgtcttccaaatatggcatgaattgccttattcagtttgaagattttgccaatcggaatgcatttcgtctcctgaacaagtatcgaaacaagtattgcacatttaacgatgatattcaaggaacagcgtctgttgcggttgcgggtctccttgcagctcttcgaataaccaagaacaagctctctgatcagacagtgctgttccagggagctggagaggctgccttggggattgctcacttggttgttatggccatggagaaagaaggtttatcaaaggagaatgctagaaagaagatatggttggttgactcaaaaggactaatagttaagggtcgtgcatctctcacagaagagaaagaggtgtttgcccatgaacatgaagaaatgaagaatctggaagccattgttcaaaagataaaaccaactgccctcataggagttgctgcaattggtggtgctttcactgaacaaattctcaaggatatggctgccttcaacgagcggcccatcatctttgctttgagtagtccgaccagcaaagcggagtgctctgcagacgagtgctacaaggtgaccaagggacgtgcaatctttgccagcggcagtccttttgatccagtcactctcccagatggacggactctgtttcctggccaaggcaacaattcctacgtgttccctggagttgctcttggggtggtggcctgcggactgagacacatcgatgataaggtcttcctcaccactcgtgaggtcatatctcagcaagtgtcagataaacacctgcaagaaggccggctctatcctcctttgaataccattcgaggcgtttcgttgaaaattgcagtaaagattgtgcaagatgcatacaaagaaaagatggccactgtttatcctgaaccccaaaacaaagaagaatttgtctcctcccagatgtacagcactaattatgaccagatcctacctgattgttatccgtggcctgcagaagtccagaaaatacagaccaaagtcaaccagtaacgcaacagctaggatttttaactttattagtaaaatcttgaagttttcatgatctttaagggtcagaatcttttatgatgattcatagagagcttagaataaggtgattttagtttaataacaactcatgggagtctattaggataaattaggataaatttcacaccagacggttttgtttcacttactgtggatatttatgttttctctgttgattattctctttatgaattctgtttaaaagctactgtacctgctgctagaaagtcctcactgatatgtaggaggctaatggaagacccactagtaataaattaatatagcataacttgattatatttaagtgcctacagttctttcttgactattttgctaaaatctctaaacagaaaagataaacacaaacttgggtatagctgaacttttactaaacagaagcactactttgttgcctagagaaaaatcttctcaggacttttattccaggcctccgttagctttgttctctttgtacacctgactcaacacctctgagaaagctcactgctgtttacagtacccttgcgtagccttagctcatcagcgtcttctgtcgttgttatgttatatcccatagagtagagctctcgaacccaaacactccataggaaacaccctttctcatctctgagcaaccctggccctgtcgagatatcgggtgtttttgttagtgtagcctgggacgtgagagggctgcaggagggtccttgagacggggccctggaacccacctctgagacaagggagtcagatgccagacagtggttcccagacaagctcaggcctccatgaagatcacctgctctaatgtccctgtgcttagttcggaggactgagagctcatggcatgagtaaatacatctctcaatgcctacctttctatcagatattaaaatatgttaattaccaaaaccattctctgagaaaaaaaaaaccaagcctttccagtgtattaatttactggacacgttgataatggcatgactagaaacagccttaactcctaagtcaggttcaagaacattctgtgtatctagagactcctgactttgaagttgctttaaagcctgtgtggtttccggcgggcaggctctgtacagtgagctccttgaagctttcaaggtgtgagctaaaacgggtacagacttcctaatgacaacattgtgactaacggtttcaacagtgtagttatttgagaaagccatttcagaatttctatcttttcttgtatgtttccatgttgtcaggtagttgtaaatgaatgtatttacctatgcaaaagatttattaaagcctagagaatatg

SEQ ID NO: 70 - DNA, 553 bp, Mus musculus
  misc_feature (553)..(553): n is a, c, g, or t
tatcctaaacagaatatgcagcatggagcgagccataccctgccggatctgctcccaagttatctttctgttccacactcacaggagagaattgactgcatctgcatgaggagatggagaactttggttgaactacagtttgtaaaaaagaaaaaaaaaaaaaaaaaaaaagaaaaaaaagaaaaaaaaagaaaaaagaaaaaaaataacctaattttattgacagaacttttttttcctttcaaattgtaaatctgtgtatgaatgtaacgcatgtggttgtttgagaagttgtgtattaggaaaagtacaccagcatcttcatgttactgagaccattttcccagcatgggcactcataaacagcacatagcagacagaccagtgagatgctctctctcattagcacctgacatcctgctcccaccacaccagacccatttcccattgttttagagatttggaaactttgtacaaattatccacggcaagataaaaataaacaagcctttattttattaataatttagttcctgttgtgcccaataaaagn

SEQ ID NO: 71 - DNA, 1958 bp, Mus musculus
ctgaggccgagggacagcggcccgagccggggctatggcgaagctcctgagctgcgtcctcggcccccggctctacaagatctaccgggagagggacacggaccgggccgcgtccagcgtccccgagactcccactgccgtccccgccgcctcgtccagctcctgggatacgtattatcagcctcgggccctggagaaacatgcagacagcatcctggcactggcttcagtcttctggtccatctcttattactcctctcccttcgccttcttctacttatacaggaaaggttacttgagtttgtccaaagtggtgccattttctcactatgccgggacgttgctgctactacttgcaggggtggcctgcctccgaggcattggccgctggaccaacccccagtatcgacagttcatcaccatcttggaagccacacataggaaccagtctgcagaaaacaagaggcagctggccaactataacttcgacttcaggagctggccagtcgacttccactgggaggagcccagcagccggaaggggtcccgaggtggcccttcccgcaggggtgtggccctgcttcgtccagagcctctgcaccggggaacagcagacacgtttctcaacagggtcaagaagctgccctgtcagatcaccagctatctggtggcacacaccttggggcgccggatgctgtacccaggctccgtgtacctgctccagaaggccctcatgcctgtgctgctgcagggccaggcccgactggtggaagagtgtaatgggcgccgtgcaaaactgcttgcctgtgatggtaatgagatagacaccatgtttgtggaccgacgggggacagctgagccccaggggcagaagctggtcatctgctgtgaggggaatgcaggattctatgaggtgggctgtgtctccacacccctagaagctggctattctgtcctgggctggaatcatccaggctttgcaggaagcacgggggtaccattcccacagaacgaggccaatgccatggatgtggtggttcagtttgccatccaccgcctgggcttccagccccaggacattgtcatctacgcctggtccattggaggcttcactgccacgtgggcagccatgtcctacccagacatcagtgctgttatcctggacgcttccttcgatgacttggtgcccctggccttgaaggtcatgccggacagctggcgagccctggtcaccaggacggtgaggcagcatctcaacctcaacaactcggagcagctgtgcaggttccagggccccgtgctgctggtccggagaaccaaggacgagatcatcaccaccacggtccctgaggacatcatgtccaacagaggcaatgacctcctgctgaagctcctgcagttccggtatcctcgagtgatggtggaggaggggctcagagctgtgaggcagtggctggaggcctcttcccagctagaggaagcctccatttacagtcgctgggaggtggaggaggactggtgtgtgtctgtgcttcgctcctaccaggcagagcatgggcctgatttcccctggagtgtgggggaggacatgagtgcagatggacggaggcagctggcgctgttcctggcccggaagcatctacacaactttgaggccacacactgcactccactcccggcccagcacttccagatgccctggcacctctagaaccacgtgtagactcttctggaaggacaagataggaggagacacgaggggatacttttgtgactctcttcatgttgctgtttatagtctggcccgtggggacatcccctctggccaacagtcctcctgcacgtttccctcatctatgtggaagcacttagctcccctcatacacacctgcattaaatgaatgatttattcctaataattaataaaaaggtattttttctacaaaaaaaaaaaaaaa

SEQ ID NO: 72 - DNA, 1242 bp, Mus musculus
ttgggatctcatttgcacaatgacggacagaagcccctttgagacagacatgctgaccctgacccgttacgttatggaaaaggggcgacaggccaaagggaccggagaactcacccagctgctcaactcgatgctgactgccatcaaagccatctcttccgcagtgcgcaaggccggcctggccaacctgtatgggatttcggggagcgtgaatgtgacaggagatgaggtgaagaaactggacgtgctgtccaactccctggtcatcaacatgcttcagtcctcctacagcacctgtgtgctcgtctccgaagagaataaagaggcggtgatcacagcccaggagaggagggggaaatatgtggtttgctttgaccctctggatggatcttcaaacattgactgcctggcctccatcggaactatatttgctatttacagaaagaccacggaggacgagccttctgagaaggatgccttgcagcctggccgcaacatcgtggctgcgggttatgcactgtatggtagtcgaaccctggttgctctttccacaggacaaggagtggatctgttcatgctggacccggctcttggagaattcgtgctagtggaaaaagatgtccggattaagaagaaagggaaaatttttagcctcaacgagggctatgccaagtattttgatgctgctactgctgagtatgtacagaaaaagaaattccccgaggatggcagtgagccttatggagccaggtacgtgggttccatggtggctgatgtgcatcgcaccttggtctatggaggaatcttcatgtacccagccaaccagaagagtcctaatggcaagctccggctcctgtatgaatgcaatcctgtggcctatatcatcgagcaagcaggaggtatggcaaccacaggcacccagccagtactggatgtgaaacctgagagtattcaccagcgagtccccctcattctgggtcccctgaggatgtgcaagagtatctcagctgtgtgcagagaaaccaggcaggcaggtagtgagcctgaacccatgagcccgcttccctttgtctttgtcaattgaaaaactagatgaatgagctatggagatgggaggaaaggcaaagaagtcaagtgacacaggtcacggtcagaacagcgccctgctgctaaggacagggttagaagccaggggtaaagaaagatacagtctttggactaaaataaaaatatgaatctgaa

SEQ ID NO: 73 - DNA, 4294 bp, Mus musculus
taggaagttagcggtggaagcccagatagcggcggagagggcttcggatcccatggcgaccccggaggccagcggcagtggcgagaaggtcgagggctccgagccctccgtcacctactaccggctggaggaggtggcgaagcgaaactcggcggaagagacgtggatggtgatccacgggcgagtctacgatatcacccgcttcctcagcgagcatcctggcggggaagaggttctgctggaacaagcgggtgctgatgcaactgaaagctttgaagatgtcggccactcccctgatgccagggagatgctaaagcagtactacattggagatgtccatccgagtgaccttaaacctaaaggcgatgacaaggatccttccaagaacaattcatgccaaagttcctgggcgtattggtttgtccccatcgtgggcgctattcttataggtttcttgtatcgtcacttctgggctgacagcaaatcctcctgaggagacctcgttgaagtgcggagcacgtgctcctgcgatgagaggaggagacttgtgtggaggctgcagggtgttccctccttggaacctgccagttgttttctttccccttggagccaagatggttgaccagatatctatcctccttcagtgtacgaccagagtctttcatccgccagagcctgacgcccaaagcacctgctcactctgtgtccttgccagggtttctctcattggttcccactccttcctttcatttcaaaagttgatgccaatgacttagagttcctatgttgtagtgacatggcctttggggacagtacatgatttctcataatttgaattcatagtagatatagttaagggaacagcagtcaggttatgaatcttttcccatttttctttttaagtaaatttatttttttaattctgatttaattttgtcattcatcataagggatttaattcatgaagttgtgtgtatcttatttcaaacacagctgccagatgatcttatttatgattgttagaagtaaggggccagcaagatggctcagtggataaaagcaattgccgcgaagcctgatgacctgtgtctgagtcactgcactcacaggatagaaagaaccgattcccaaaagttgtcctctgacttccacatgtgtgctatggtctttgcacacacacgcacacacacacaccccagatgttatttttaaaaatgaagtacagcaacagtggctatctacccctgccccctccagacagtgtagctgatggctcctcctgtctctaagtcccgcctcttttcccaaaatacttcacaaagtgtgcatccctttgatttcttaggaatctaagagctgaagaaggactgacttcagagtaatctcttttacaaagagaaccaaacactacttacaggagagcagtttaaaaagggaccaacatgcgctctctggtctgacactggtttctaaccatcttccaccctggctgtctttaccagtgaaagatgtgtgtgtgtgcttaccttctatacacttctctccggtccgtggggcttcacaaaggcctttctgctgtttttctttaccgattagcaaatttctgattccttgtcttaaagtacaagactcaagtttgaacttatgtttatctcagtaaaataacttagatgtaaatgtcattgtccggcatgccccttcagattgggagaccatgccaagagacttcggttttcatctgggttttacctccatggcgccaacttttggttttgtcctactttctattgagggtaatgataaatctggaagctttctttcctcttggatatgaatttcactggaaagtaggcagtcatttaaaattccttctctcgttggtccaggcattttcctggcacctctgactgtattctctctccctgtggcagtgcctgacagtacccagctgtttcttagtttctatgatctttcttcacatctttgttcattaccagtcagcttctgggctggtgtcacatccagcaggaaaccatgggattccagcaggaccagagatgttgggaagtgtcctcctgcctcccttccagcttgccaggggcttgacaggacaggaaactgcacagtaaaccagtctgcccgtgtaaactattttttaaaaagttcagtccaggactcgtatcctgtgatttagcagttgaatgaattcagaattcatcaaaataacattaaccttttccttacacacttgaatatgatattttagagtgatttctaggtgacttttatgtcagagatgaagacttaatcaaccattcgtctttagaaacgtctgtaatattgtgtcatagattgacagcgtaattagtctgtaacaaaagcggcatgcggcgcgcatctccaggtaaaggcagggaaggttgtgtgcagggagcccgggacctgcatgctgggatagcgaagtcacatggagtatgctgggtagaagggaagaacaaaggaacattgagtgcaggacaggagcgtcccagctaactccaaacttgatgggacacctagtgaaaaacatctggcttgtaggaaatgttaaagaactgcattttcggctgggcatggtggtgcacaccattaatcccgatgtaggagagacagaggctgcagaatctctgagttgaggccagtctggtccacatagtaagttccaggacagtcaggctacatagagagaccatgtcacaaccactccaccaaataaaagaactgtattcttaagtagaatcggtgttttgatatttctacagtaaacatcaataccaaaagccgttttttctatttcacatttgtgtctttcccagcttcttatagctgagctttttctcccgagagccagaaggaaaagattttcatacttttgtctttgcgatccatgaaatccgtcaatacccagggcttcttttgaactactgataatgtaatgtcattttatattatataaaaaggatgctttttttttttaaatctttaatcccagcacttgggaggcagaagcagacagttctcttgggttgtaggtcagcctggtctacagagcaagctccaagccagccaaagctacataatgagattctgttcaggtctacttgttgtaatcctgttgcctacataaacagctaggggaaaggtaggttttaggtgatcgtttgtcaaggctttccgtaaacggcaaagcaacacaacatgtgcacaggtgtacttttaaaagtctaaacttgtcaaagaagcctggacatttgagggtcatgaaaaaacattaagaccaagaggaggcagttcctatccactgacagcacctcctgacctgtgggcgtgggcaggtttgattgtttattcttgaggtgaccagctgctgccacatatacaggtaatggcaggtgaacatgagagatttgtgctacccagataaaatgtgttaacacccattctctaaaagtttctacccagccctgggagctggttttcatcactgagtgatgtacagaaagcaatagcacacagtgtatggacttacttaagcagagacaagtctgtccagagctgtcacttgagctggctggctcttccagcagttgccatcggggctcacggtgtagggtttgtgctcattaagtgctgatggcaagcagtggaaagtgatttacaagcaaggtgtgtcatcacatgcagcactcatgcttctgtctccagtgatgcccgtccggctgaagtcgacctgagatgactgaagcaaggatcgtaaatgttcattgcctcctaccccaagggaagtggactcagacatgtcttgtctcaacgagaaaccgaagggttgaagctgtgagattcagttgccaaatatcccaaaagtaacggggagctccgtcacatttggccagctttgggatttgtgggagtggtctaggagggaggctgaagaagcaggggtgtgccagtcacctgccttacacccagtgtcctactcatgaatggcaggggccactccttgcccacgcctgcctcgtctaatcagctgcttgggcagacgctcctttcggttatttggcttgtcttttcctgcaccctcaactgagtggctaatactacattccttttgtgaattcaacgatggggtttgtttacctatttggtttcagcttattttgaacaaagatctttgtctctttctactggaatgtgcacacagtgaatgtttgttagaactacacaataaagatactgttttccttttcttgtcccg

SEQ ID NO: 74 - DNA, 2155 bp, Mus musculus
tgcgggcaaagagtgtggaggcgcggacgcgcggcggagctcgagctgctgcagctgctgccgccgccagagtaacctcgacccccgagctccggataccggtgcctcgccatggctgaccagctgactgaggaacagattgcagagttcaaggaagccttctccctcttcgacaaggatggagatggcaccattaccaccaaggagctggggactgtgatgagatcgctgggacagaaccccactgaggcggagctgcaggacatgattaatgaggtggatgctgatggcaatgggaccattgacttcccagagttcttgaccatgatggccagaaagatgaaggatacagacagcgaggaggagatacgagaggccttccgtgtctttgacaaggatgggaatggctatattagcgctgccgagctgcgtcacgtcatgacgaacctgggggagaagctgacagatgaggaagtggatgagatgatccgagaggccgacattgatggagatggccaggtcaattatgaagagtttgtacagatgatgactgcgaagtgaaggcccgggcagctggccatgcccgttctcctgatctcttctcgcgctctcctctcttcaacactcccctgcgtacccggttctagcaaacagcaattgattgactgagaatctgataaagcaccaaaagatttgtcccaagctgcatgactgctctctctccttcctcctgactgtccctccacgccctcaccgcttcctttggccttccccttccattcccagtctccaggcctgatgcattcacaaggtgaaccccattgccctgccctggggagcctctgccctcctcctccagcccggatggctctcctccggttttggtttgtttccttttgtttgcccttcttttgggtgccggggtggccaccattcctgtccctgctcagtggggaggggagcaaggccttctgccaggtggaggagcatgtcccctgccactgtcgcatgcaccccagccctgtgactctgtgtgcaagcccagcagcctgtggggcggggtgccaagaggggatgacgggacgttccaggaccgagggagttgaggatgtgacccaggacggggggcgggggggggggttgtgtgtgtggaagggtgggaagaggcaggaaggccttggaagctaacatgctttcgctactggagggggactgcatagagtggacggcactcgggtctcgctgccgctgttctgaaaccatctggctggctttctgaggtcaggctgggtggggggctgtcatcggccatgctgccgatcatactcgccctcctcatccctccagccatgtcccgctgttctgtaaatacctggtgctaacatcccatgccgctcccccgtggcacccccagccacctgcccagttcagggctggtccaggaatggatgtgggggatggtcgctgtgtaatgtgccggtgatctttttttccccttcccctttatgccccttaaaactttgatttttgtcctaaacatgccgggccaactaaagggtggggagaggagagatgcgccccaccatgctcacaagaaccaacctgcaataaacacttctatgggccgccgcgcagagcacgcagcgggcacctcctgcccctccgtggtgacttggcatcgctttctgccctcgccctgcctgccccactccccagcggagagcatgatccgcacccttgcttctgactctagcctctgggacacgtcagtcaacgcgggcagttcggtctgggttcctttcctttctctgttctcatctggccccccagggtgatcttgttgctttttgctgggacctgccagctttgagactctccaccccttggcaccagccttaagggagggagggacagagcaaatcaggagacccagcctagagttgagggcaagggcaggtaggcgtgaggctgtggactttgcggaatgtttcggggttttattttggttttttgtttttccttttttttttttttttttaaacaaacaaacaaaccgggcaatattgtgttcagttcaagctgtgaagaaaaatatatatcaatgttttccaataaaatacagtgactaccaaaaaaaaaaaaaaaaaaaaaaaaa

SEQ ID NO: 75 - DNA, 2447 bp, Mus musculus
tctctccgcgctccctcccctgctgtgaagatggcgctgtccagggtgtgctgggctcgggctgctctgtggggttcgactgtcgcccctggaccctttgtcacccggaggctgcagctgggccgctctggccctgcgtggcgagcccctcggtcttcaaagcttcacctttctccgaaggcggacgtgaagaacttgatttcttacgtggtgaccaagacaagagcgattaacggatcgtaccatcgtttcttggggcgtcatttcccccgcttctatgccttatacacaaccttcatgaaaggaatacagatgttatgggctgatggcaaaaaggctagaagaataaaggcagacatgtggaaacaaaacctaaagtttcatcaactctcttaccgggagatggagcatttgagacagttccgacgagatatcaccaagtgtctcttcgttggcctcatctccattccaccctttgccaactacctggtctttttgctaatgtacctgtttcctaggcaactgctagtcaagcatttctggacccccaaacaacaaattgatttcttggacgtttatcatggtctccggaggcggtcccactcggaagtcatcacacatctaagaagggccagcacttttgtttctcatgagaaactccggaggcagctgacagacctgtgcaccaaggtgcagagtggcacccacccagcagcacaggacgtcctggctctcagagattgcttctctacctaccccttgggcttcagccagctccaagcctcgcagatgagagccttgagccaggccatgctcctcacaccttacctgcccccgcccttgctgaggcagcggctaaagagtcacaccaccgtgatccaccagctggacagggctctggcaaagctggggattggccagctgactgcacaggaagtgaaatcggcttgctatcttcgtggcttgaactctacccacattgctgacgacaggtgtcgagcctggctgggggaatggttgcacatctcctgtagcctgaaagaacccgagctgtccctcttgctgcacaacgtggtcctgctctccaccaactaccttgagacaaggcgctgagtgaaccccacggaaaggacggcattgtcctgcagtcacctagtgtagtggtgtgggaccaagaagcacctgtcagctgtctgtgcgcaccactagtgtgggaggcagcggagtgggttccacgggcttcagagcacgctacccccctgggagctatagacattccttcacagcttgagcctaacaaacccatgtgtgctaacctggaactggcaagcatctctggtactgaacttttattgtgatgtaatacttaggtcctataaagtcagcctttgcccaggtgggaatcatgtggcctaaaattgagcactgccatggttttgtttttaaggtgttttttgtgtgttcctttttgagatgagtctctgttgcccaggctggcctccaatccctgtgctcaagggatcctctctctccagactcgggtgctgcggctgcactggcctcactgccacgttctctacagccgagccttgttttcctgagaccccgtgtctcatgtagccgaagaggaccttgagatctggtcttcctacccccagctcccaggcgctggaacaccggcaaggagcccacgaagctctggggtgttgtcttggctgagtgctttttaccgagtctttgtgcactagcggatctctggtaccaagaacagtgcagcttactctggggtgagggcacccatgcctggccctgcgccaacaccccggcagtggtttttcttatgccccctcccttttccttttatggcctttttgagagtcttactgtataacctggcaatcctgacagacaattctgccacagcctcctggagcgagaatataagcatgagccacacccatcctttctggtgagaccaaaagtagggctgtttctcctcgtcactatcatgggctaacttccacccctcctctcagtattctatggacactttttttttttttaatagtaatttatgggaacattctaaaggaggcggtgagaaagaatggctgcctggcccctccctgcgtttgtccccagtgtcttactttccaggctgtcacacagcccctagggaccttacatgtttgctacctccactgtgttgcactaagccatctgtaaccagcagtggctgccttctctaggctgtgggtcaaaaacgcacaaggtactaattactgcccagccctgggagaccaggagatttgcaatagatagtgagttgggcttaactgtcgtgtgtacatctatgccctgtcgttttgtaataacttactgtaaatgcatgaagcactggtttaagcctaagtaaagactgcctgaaaccaaaaaaaaaaaaaaaa

SEQ ID NO: 76 - DNA, 1164 bp, Mus musculus
atacccttctccaacagccataatacgcagaagctgcgcttcccggccgaggatgaattccctgatctgagcagccacaacaaccatatggccaaggtgctgacccccgagctgtatgccgagcttcgtgacagttgcacgccgagcggctttactttggacgacgccattcagactggcgtagacaatccgggccacccgtacatcatgacagtgggtgcagtggcaggcgacaaggagagttacgacgtattcaaggaactcttcgaccccattattgaggagcggcacggcagctaccagcccagtgatgagcacaagacctacctcaacccagacaacctgcagggtggcaatgacctggaccccaactacgtgctgagctcgttggtgcgcacaggccgcagcatccgcggcttctgtcttacaccccccccccgctcccccaccccaccctgcagccgcggggagcgccgcgccatcgagaagctggcagtagaagctctgtccagcctagatggcgacctgtctggcaggttctatgcgatcaagagcatgaccgaggcggagcagcagcagctcattgacgaccacttcctcttcgacaagcctgtgtcgcctctgttgctggcctccagcatggcccgcgactggccggatgctggcatatggcacaatgacaataagactttcctggtgtggatcaacgaggaggaccacctgcgggtcatctccatgaagaaggggggcaacatgaaggaagtgttcacccgattctgcaccggcctcactcaaatcgaaactctcttcaagtccaagaactatgagttcatgtggagccctcacctgggctacatcctcacacgcccttccaacctgggcaccggactgcgggcaggtgtgcacatcaagctgccccacctggggaagcacgagaagttctcggaggtgctcaatcggctgcggcttcagaagcgaggcacaggtggcgtggactccgctgctgtctgtggcgtgtttgatgtctccaatgctgaccgcctgagcttctcggaggtggagctggtgcagatggtggtggacggagtgaaactgctcattgagatggagcagcggctcgagcagggtcaggcaatcgacgacctcatgccggcccagaagtga

SEQ ID NO: 77 - DNA, 2003 bp, Mus musculus
ggtccctgtcgcctgcgcacgcgggccaaggcgcaggtaaagggttacccttgcctgggaggctcgcccgctccccgtccacgtgacgcggcggcccaatgaccgcagcccgggctgaggctgcagcgcgacaggctccgggcgtcgctgacccactcgcgtgtcccagcgcggacgcccgaggcccacgaagccatgggcgccgcgactctggagccgccgccccgccgcaggaagagcggtttaacacccagagaagcctaatggacaagcgccccagcagatggtaacaaaagataatccagatggggtgcaggtgttgtaagatgatacaaagctatctctttgatccagttcaagtgccctcgcctggttttgtcaatgaagtaaacaactgcaagttggaggaagatgacactgtcagactaaaaggcacccagaacagtgaggttgaggtgcccaggaatgccctgcacgatgggagcctgagcaattcagagagcagaggcagtacaactggtctacctcaccaaggaccgctcccccaggaggactcagaagagagaccctgtgtggagaagcagggtattgtcaatggcatcagccccactgctactctgcagtcggtcaggagttccaggctccaccaggttgacaatagctcctgggccagcagcccctgggtagccaccatagacagtgctcacctggctcaacccttccttgaaggagaagactacaggaagcaaagctgcctgctgcccaccttggaagggacccagatggtgggacatggagactgcagagcccctgcggaggccttggcagtggcagatcacatcccatacataccagccccagattatccccagctctggagccccacagtagacaacgcagaccctgaagaaaaggattgtctttttgaaaaccactctgaggtggagccccttccgggaattcagcccagggtgagccagctgggtttgaacgtgcccttctccctgcagagaagctgggactcactgaatgaggcagggaccacagaagttctgagtgactacttcaaagaggagggtcccactcaccctacgccagcggctgattctggaagtgatcgggaagacccccacacctacaacggggacagggagggtgttgtggtagatgaggatgctgaggtggcagaagccctcgcagcattagaagctgctaccgcaggagaagatgcagatgatgccgattagggggaggggggaggcgaggcgagggagcttcagtcacagggagcagatagaagcatgtgcctactctgccagcatgccccggcagccttgccagctggaccagttgtttacatctgttatcttcccattgccagtacctgtgccatgctgcttgctgtatagggcatccctctactccgaatgcattcagaatgctagcatcaaaataagagtgggccttcatgtccatgaccacaacaagtgcggaagttaagcagcttgcatgctgtccctgaaagtgcccccccagaacatctgtccagatgtgcacgagaatgcccggacatccccactcttgatcccaggggccattctgtttgaatgtatttctttaccttgtttttgagagccaaatacttcacccaacctagaaaaaggtaacgatccacttaaagtgcctactgtgtgccagagcttaacttcagggacagtcacccagggaaatactaactaaccacttgttgaacatcaagtacccttcagggtagagcagacttgaactgtgaacaaatggttagtcctccactgtgctaggagagcaccctgaccttaacttttttttacactattactttttaatctcctttgggatacgggaggctggccaaaatacttctcaaaactgtcgtcatgttctaggttcgagttcgtgagtgttttgtaacagcctagccatttatgaagggctctgtgtcattaaacgtctggttctcactc

SEQ ID NO: 78 - DNA, 2856 bp, Mus musculus
cgtcgctgccgccagcctctgtctgcccgcgtagctccaggggccccgccgaagagccgttggcgggttcggggccgatacccgctcgtgggaaagagtgtccgctgtcgtccgcgcccgtccacgctcgcagccggccgccgccatgctggcgctcatctcccgcctgctggactggttccgttcgctcttctggaaggaggagatggaactgacgctcgtggggctgcagtactccggcaagaccaccttcgtcaatgtcatcgcgtccggtcaattcagtgaagatatgatacccacagtgggcttcaacatgaggaaagtaactaaaggcaacgtcacaataaagatctgggacataggcggacagccccggttccggagcatgtgggagcggtactgccgaggagtcaatgcaattgtttacatgatagatgctgcagatcgagaaaagatagaagcctctcgaaatgaactgcataatcttctagataaaccacagttacaagggattccagtactagtacttggaaacaagagagatcttccaaatgccttggatgagaaacagctaattgagaaaatgaacctgtctgctattcaggatagagaaatttgctgctattcaatttcttgcaaagaaaaggataatatagatatcacacttcagtggcttattcaacactcaaaatcccggagaagctgagacctcttcttcgtcttccagtccccttggctctaaccttagaactcctgtcgttcctctgaagtacttcccaggacatggtccttcctaaacccaagaaattgcctttttcagagtttatttctcatgtgcactgctgaagatgtgtattcctatccttcatagcaaatcagctggagttgtcatgataaaagtcagcacacactaaaaggcttcatacacgtgtctagtgtgttgaggcctctttcctttctattttaaacacccacatttttgaccatcttaattaagaaaattgcatattaccattctggtctttctgggccagatttttgtattggttttcagtaaatgtctacctatttcattacagagtccagtagcttctactactggtatggacttgatgcagcatggaatttctagtgccacccacagtatttagaaaacctttaagcctgtctgatgtgggatacggacatactgtttatcccatctcacacatgcatgtgaaatgtagacttacactgtaggaataattggtctgtcagagttaacagaggcaccaggtcagaatagtagcttccttacactggagatttcctacctggtgaatttttaaaaaccttctgctttctgaaactcctttgtcagcagatagcgtctggggaggtgggaggagtcacagcatgctcttttctatctgtccagatcattaggttttttttcccccttttaacacacttttttaaagggatgggaattgaagtttttttttttttctctcaaaagctttcatgaatttagagcattctagctaatgtaataaaaccctttaagaatgtccgacttcatctgaatccacgtctgttctttgtctccaggcacccaccctgtgctgctgcatgccacccttaattcctgactttttatatctagtcatgaaggtgactttcagcacaaaggacacttataaacaaattcttatttttttcttaccaatgtaaggtttggcactcttttcactggtgccactagacttattgattgtgacaactctagacctgcctgctttatctaatgtaatcatgcgcaatgtctacaggttgtttgatgatcggccacacagagaacggaggaagcaatgctgtttattgtttgctatgatacagagctgtacaaaaacttacaatgaacatattttgtagcttagtgatctccacgtacataaagggacatattaatactggttgacttgtaaattgatactcatgccgatgtagtagatagaccccatgctcccacctgcttatgtgttgctcacactgtgtgtgatttgtctcttctgttaagcagcacctatgtcaacagtacatattcagatgtgttgagcactccaggtgtagtcagtaggaagttcttttactgagtaccgttttaatttatagactgccacggccttaagaacattctggacagataactgcaccatgttgcacaggcactacttgttctctccattctcattcttactgagtaggacctgggctggaaagttctcttcttattcacggaggcaggttgcactcttcctgaattggatgggtggtttgaataaagggatatttaaactttgctcctgtagcccgacatgactaatggtcactgtgcctaaaaggagggattggaaccagaatgtttaactaagcggggactgcataagttcttgttaattgacctatggaaaccttaatttgtttatgtgtctttccattgctttccagcatttcaggacatctaaaagctactaccaacattttcctgtgcataacctctgcatgtgaaaacctaacagttactgaactttgtaaatacgtaaattttttatttaggtgtggatgcattttttgtctgtttactgctcctctcagctttattcaataaacttgcattttgagggttgcattgacaattttaccttaaaatgtatcatgatggaaagacgcagacctttggactcgagtgggaagataatcactctggaaagggctccacagactgtgctggaaggtggctgcctcagctggccgaggtgttgatgggatgaactagaaataaacttttacagtgtctaaaaaaaaaaaaaaaaa

SEQ ID NO: 79 - DNA, 2450 bp, Mus musculus
ttcctctgtctcttccggggttttttgcttattaaagatcttttcagcttctctcactaaatctcctaaggtcttgctctttaaatcttttaaccgctctaactttcgcccaatatccgggcagactgccagatgaatgacatagacacattggtttcttgccctgggtcctcagggtcataaggagtgtacctgcgataggcctccttgagtctctctaaaaaggctgagggagactcattaggtccctgggttatccctgttacctaggccaaattggtggcttctgcccgcgttttggagacccgctaagagcaactggcgatagaggactaggtggttcctaccttctgtagtggtgtaatctcaatcggggcgctcaaggggaaaagcagcattgacttcattaggcaactgagtggggcgtccatcattgccccggactgcctttctagcctctaggagcacccgctgcttttcttctccggtcagcagggtccccaacaactgctgacagtcgtcccaggtgggctggtgggtgatgaggacggactgacgggcgctcctcggggtttggcgcggcgcctccatgggtcaggccagccgggccaccgtgctgtgagtgtttccaccactccaagaaggcagcattcagagttcttggctaagtcgaccttgtgaggagctggtgataatttgattccatctccaggttccctgtaagcacatcgagaaccatgagcagctttactaaggacgagtttgactgccacatccttgatgaaggctttactgctaaggacattctggaccaaaaaatcaatgaagtctcttcctctgacgataaggatgcgttctatgttgcggacctcggagacattctaaagaagcatctgaggtggctaaaagctcttccccgcgtcactcccttttacgcagtcaagtgtaacgatagcagagccatagtgagcaccctagctgccattgggacaggatttgactgtgcaagcaagactgaaatacagttggtgcaggggcttggggtgcctgcagagagggttatctatgcaaatccttgtaagcaagtctctcaaatcaagtatgctgccagtaacggagtccagatgatgacttttgacagtgaaattgaattgatgaaagtcgccagagcacatccaaaggcaaagttggttctacggattgccactgatgattccaaagctgtctgtcgcctcagtgttaagtttggtgccacactcaaaaccagcaggcttctcttggaacgggcaaaagagctaaatattgacgtcattggtgtgagcttccatgtgggcagtggatgtactgatcctgataccttcgttcaggcagtgtcggatgcccgctgtgtgtttgacatggcaacagaagttggtttcagcatgcatctgcttgatattggtggtggctttcctggatctgaagatacaaagcttaaatttgaagagatcaccagtgtaatcaacccagctctggacaagtacttcccatcagactctggagtgagaatcatagctgagccaggcagatactatgtcgcatcagctttcacgcttgcagtcaacatcattgccaaaaaaaccgtgtggaaggagcagcccggctctgacgatgaagatgagtcaaatgaacaaaccttcatgtattatgtgaatgatggagtatatggatcatttaactgcattctttatgatcatgcccatgtgaaggccctgctgcagaagagacccaagccagacgagaagtattactcatccagcatctggggaccaacatgtgatggccttgatcggatcgtggagcgctgtaacctgcctgaaatgcatgtgggtgattggatgctgtttgagaacatgggtgcatacaccgttgctgctgcttctactttcaatgggttccagaggccaaacatctactatgtaatgtcacggccaatgtggcaactcatgaaacagatccagagccatggcttcccgccggaggtggaggagcaggatgatggcacgctgcccatgtcttgtgcccaggagagcgggatggaccgtcaccctgcagcctgtgcttctgctaggatcaatgtgtagatgccattcttgtagctcttgcctgcaagtttagcttgaattaaggcatttggggggaccatttaacttactgctagtttgggatgtctttgtgagagtagggttggcaccaatgcagtatggaaggctaggagatggggggtcacacttactgtgttcctatggaaactttgaatatttgtattacatggatttttattcacttttcagacattgatactaacgtgtgcccctcagctgctgagcaagcgtttgtagcttgtacattggcagaatgggccagaagcttattttgtgacccattgtgaaaataaaatatctttaaat

SEQ ID NO: 80 - DNA, 3733 bp, Mus musculus
ctgcctcgcagccgtcgggatggaggtgagacggtagccgcgacgcccgccctcgcgcacccctgcaccacagcggcctgcagagctccccgccccccgcccccgcggcagcgggccttgccgtcgagtgacagcggcctgggggggcagggggggcgggggcggccagaccagcgatgccggcgggcatgacgaagcatggctcgcgctccaccagctcgctgccgcccgagcccatggagatcgtgcgcagcaaggcgtgctcgcgccgggtgcgcctcaacgtcgggggcctggcgcacgaggtgctgtggcgcactctggaccgcctgcctcgcacgcggctgggcaagctccgggactgcaacacgcacgactctctgctccaggtgtgcgacgactacagcctcgaggacaacgagtacttcttcgaccgccaccctggcgccttcacctctattctcaatttctaccgcaccggccggctgcacatgatggaggagatgtgcgcgctgagcttcagccaggagctggactactggggcatcgatgagatctacctggagtcctgctgccaggcccgctaccaccaaaagaaggagcagatgaacgaggagctgaagcgggaggctgagacgctgcgggagcgggagggcgaggagttcgacaacacgtgctgtgctgagaagaggaagaaactttgggacctgctggagaagcccaactcatcggtggccgccaagatcctggccatcatctccatcatgttcattgtcctctccaccattgccctgtcactcaacacactgcctgagctacagagcctggacgaattcggccagagcacggacaacccgcagctggcacacgtggaggctgtgtgcatcgcgtggttcaccatggagtacttgctgaggttcctgtcctcgcccaagaaatggaagttctttaagggccccctcaacgccattgacttactggccatcctgccctactacgtcaccatcttcctcacagaatccaacaagagcgtgctgcagttccagaatgtgcgccgtgtggtccagatcttccgcatcatgcgcatcctgcgcatcctgaagttggcccgccactccaccggtctgcagtccttgggcttcacgctgcgcaggagctacaacgagctgggcttgctcatcctcttcctcgccatgggcatcatgatcttctccagcctggtcttctttgccgagaaggatgaggatgacaccaagttcaaaagcatccccgcctctttctggtgggctaccatcaccatgacgaccgttggttacggagacatctaccctaagactctcctggggaaaatcgtggggggcctctgttgcattgccggtgtcctggtgattgccctccccattccaattatcgtcaataacttctccgagttctacaaggagcagaagcgccaggagaaagccatcaagcggagagaggctctggagagagccaagaggaacggcagcatcgtgtccatgaacatgaaggatgccttcgcccggagcatcgagatgatggacatcgtggtggagaaaaatggagagggcgtggctaagaaggacaaggtgcaggataaccacctgtctcccaacaagtggaaatggaccaagagggcgctctccgagaccagctcgagcaagtcctttgaaaccaaggagcagggatctcctgagaaggccaggtcctcgtctagtccgcagcacttgaacgtccagcagctgcaagacatgtacagcaagatggccaagacccagtctcaacccatcctcaacaccaaggagatggcgccgcagagccagccgcaggaagaactggagatgggcagcatgcccagccccgtggcccctctgcccacgcgcacagagggcgtcatcgacatgcgcagcatgtctagcatcgacagcttcatcagctgcgccacggacttccctgaagccaccagattctcccacagtcctctggcatccctctccggcaagtctgggggcagcacagccccggaggtgggctggcggggggctctgggtgccagcggcgggagactcatggagaccaaccccatccccgaggccagccgctctggtttcttcgtggagagcccccggagttccatgaagacccacaaccccatgaagctgcgagcgctcaaggttaacttcctggagggcgatcccaccccgctgctaccggctctgggcttgtatcacgatcctcttaggaacagaggaggcgcagcggctgcagtcgccggactggagtgtgcctccctcttagacaagcccgtgctgagcccggagtcctccatctacaccacagcaagtgccaggacgccccctcgctccccagagaaacacacagcaatagcgttcaacttcgaggcgggggtccaccagtacatagacaccgacactgatgacgagggtcagctgctctacagcgtggactccagtcctcccaagagtctccacgggagtaccagccccaagttcagccttggagctagaacagaaaagaaccacttcgagagctccccgttgcccacctcccctaagttcttaaggccgaactgtgtctacgcctcagaagggttacctgggaaaggtcccggggcccaagagaaatgcaagctggagaaccacacctcccccgatgtgcacatgctgcctgggggaggagcacacgggagcactcgggatcagagtatctgagctccctaccacagagggtatttgcaggagacatcgaggaggagggatgcttggcctgcctgccgctgagttctgcgtgaactcggagacccaaggaccccacacacacacaattttccccacccccgcagagccccagcgacaggagagaccctgagagccacgacaagtctgtggacaccaactaggatggggaccacacctaacagcttcttccttagatggcaggagcagagctgacagccacatactcctagtctcctttagaggctctgtctgcctctgagtgcgtcatcgccatctctcatggcgtcagctgaggcaggtgttggagcaaggggttgctagtgagagagtgggctggccaagcagtagtgggtgtcccccctcttgttagaggggtacagaggacacttgatcctgagggagtctccacttcatcagccacactcctagggcataacgcttaaacaagcagcggctcaaatgattcagtattctgtggtatctggggctttagtctgagaagctgtcaggaggagctgacaatttaaactcaatcctttctgctcacctggcaatccagaaagggttccaacagttggcacgcagccaaggggatataagccagggctgtcacaggaatgcgggtcccaaacagggctagcccggactgaaaagataagcgtcaaatatgcaaacgagatagattattcaaaaagactgtgtgtgactgaaaaacaacattaaaaaaataataaatttcattttctacatgaaaaaaaaaagaaaaaagaaaagaaaaatccttcactgaactgccctgtgaagaattgtgactactttctgctgtggtgtggtagggaacacacctactatgagaggaagttctctctctctttttttttctttctttttttgtttcctgtagtattcaagctaaaaaataataataataataagttaataaaaaaaaaaaaaaa

SEQ ID NO: 81 - DNA, 924 bp, Mus musculus
atggggactggaaaccattcaatggtaactgaatttatcttggctggattctcaaccaaaccagagctgcacctgcccctcttcctcctcttccttggaatctaccttctcacagtactggggaacctgggcatgatcatcctgattctactcagctcacacctgcacacccctatgtacttctttctcagcagtctgtccttcattgacctctgccattccactgtcattacccccaaaatgctggtaaactttgtcacagagaagaacataatctcctaccctgagtgcatgactcagctctactgcttccttgttttcgcaattgcagagtgtcacatgttggctgtgatggcatatgaccgctatgttgccatctgtaaccctttactttacaatgttgtcatgtctcatcatctctgcttctggctcaccgtgggagtttacagtttgggtattgttggatcatcagttcacacaggctttatgttaaaattaaatttttgcaagattaatgtgattaaccattatttttgtgatctttttcctctcttggagctatcatgctctagtatatacatcaatgaactcttggttcttttcttgagtgcattgaatatcctgacacctgcattgaccatccttatgtcctacatcttcatcattgtcagcatcctccgtattcgctccactgagggcaggtccaaagcctttagcacctgcagttcccacatctctgctgttgccatcttctatggttctgctgcatttatgtacttacagccatcatcagtaagttcgatggaccaagggaaagtgtcctctgtgttttatactactgttgttcccatgctgaacccattgatctacagcctgagaaataaggatgtcaaatctgctgtaaagaaaattctaaacagatga

SEQ ID NO: 82 - DNA, 1631 bp, Mus musculus
ggctgaacgggactcttttctttcagactgaccgcggggcagctgcggacgatgtcgaccccggcccgtgagaggctcatgcgggatttcaagcgattgcaagaggacccacctgtgggggtcagtggcgccccatctgaaaacaacatcatgcagtggaatgcagttatatttggaccagaagggacaccctttgaagatggtacttttaaactagtaatagaattttctgaagaatatccaaataaaccaccaaccgttaggtttttatccaaaatgtttcatccaaatgtgtatgctgatggtagcatatgtttagatatcctgcagaatcgatggagtcccacatatgatgtctcttccatcttaacttccattcagtctctgctggatgaaccgaatccaaacagtccagccaacagccaagcagcacagctttatcaggaaaacaaacgggagtatgagaagagagtttcggccattgttgagcaaagctggaatgattcataatagacacctggtctgctcatccttcatcgttgttgtgtataatttacctcccagtagaaaggctagcaagttttaagtgccacgggttttaaggattctgcagagaaaaaaagaaaaagtccttcagtttagaacctacaaaagcttgtgtatcttgattaatgtactttttattgcatggtgtgaactaagttattgctgcataaatttgtaatatatcctgtttgtatttttttccaagtgtataatgttggtgtggagttttcatgacagaatatacacattttgtaaatctgtacttttttcaaatattgaatgccttatttttgaattctttagatttttaaattggagaaaagcacttaaagttttttatatatgaatattacgtgtaaagctgttaaaatacataacttcagtgcaagagactttgtcacttatttcctcacctgtgcaagagggactgcgaagtctctgccaggtgagagcctcatttccaactgcagaaggtcactcttctgtttatcaagaaagtctgcaaattcgattctaaaaccaattctgatctccggctttattttgaatgtacttctgtaagttcagttgagtaactatagacttactagtctggttctgtccagctctgtatttgggccacttgttaatgtgcgtttctcatgtaaactgtaccttttgtgacttcacaattggcacctccaccacgagcagagctgacttcctctgctgtgtggcagcaccttcacaggcttttgattaaaaagaaagtaaaaccatcaccatttaccaaacaccgtgccgcagtattagcaatggccggttgcgctggtttgagcaaggcagagatttggaaggaatcttggtgtaacttgaatatttgcaaactaccttttaagtgcagtgcgcgctacctgtttattctggaactgttgagcaccagggcctgccgagttgcttctcacctcctcagttgtatccaagttgtactgcatcttagtttactggatagatttaaaacacagtattgtagaaagctaatacaaagctatcctatgccttcaaatagtatagaaaatggaaaatatacaagtaaattctgttgg

SEQ ID NO: 83 - DNA, 514 bp, Mus musculus
gagaggtgtgtggtggggttgggggctggacatggccccctgtccccagcctgaatcctgcccagctggcagcccccttggcctgatatgtctgtcccttttgctcatccctgcttcagctggaacctactgtgaatgcagccttggcctcagccgtgaggcccttattgccctcattgtggtgctggctggtgtcagtgccagctgcttctgtgccctcgttgttgtggcgattggtgtctttcgggccaagggtgacacgtgccctggacactcggaaaacaggttggtggggccctacggagtccaggaagatcgcatagacctgcacacggtacatgtggagtcccacctcatggaccctgatctggacgtatccatgatgccgtccttggatggcccaggcctcatgaccatgactgctcctctagagccacctccaccccctcctcctcctcccccacttccacagtagtggagagcaactagggtggagaattaaacagtatttagc

SEQ ID NO: 84 - DNA, 1264 bp, Mus musculus
cgggctttgagaagccatcataaatatcctgacctaatgccttagcagccataagaaggaaaagaatgtactcgcctgaagataacgtttgagatatttaaaggtgtgggttaattttttatccactccaataactgttggttttttttttttcttttttttctgttccttctgtctacttctttgctctctatttctacccccgaagctgcaggcacacggatctctgcaggcaaaatccgtcagagcctacgcaggacagccttctacggacttcttcattccactgtaacttggtggctgccccttctccgaaatggcaggtgtgagcagctgtttaaagtattctatgtttttcttcaacttcttgttctgggtatgtggtacactgatcttgggactggccatatgggtgagagtaagcaaagatggaaaagagatcatcacgtcaggagactctagcacgaaccccttcattgctgtgaatatcttgattgcagttgggtctatcatcatggttctaggtttcctgggatgctgtggagctgtgaaagaaagccggtgcatgcttctcttgttttttatcggcttgctgctgattctgattctgcaagtggcagcaggcatcctaggagccgctttcaaacctgagtataaccgaattctgaatgaaacgctatatgaaaatgctaagcttctgtcggacaacactgatgaggcaaaagacttccagaaggccatgattgtgtttcagtcggagttcaagtgctgtggcttggagaatggagctgccgactggggaaataattttgtggaggcaaaagagtcatgtcaatgtacaggaactgactgtgcaacttatcaggggagttccgtttacccaaagacctgtctttctttgatcaaagatctgtttgaaaagaacattattattgtcattggaattgcttttggactggccgttattgagattctcggtttggtgttttctatggtgctatactgccagattggaagcaagtgaacctgaggatttacctagtcatcataaacaccatttgagtttttgctttggcttcatgactttaaatactcgaatactgtaaataaatgttattgaagtatctcactgaggcagtctacagatatcttcacaggtattcactgtatttaactgtgaaggacataatacaaatggttgtgtatttttttttttctctcacaataaaaagtgttggtgttgaaaaaaaaaaaaaaaaaaaaa

SEQ ID NO: 85 - DNA, 2784 bp, Mus musculus
agagagtgggtcagggcggtcctgtggctgggaagtcccagctgttggtccaccagttgggctgtgctggcagccatctctctcctggacctggtctcaggatcctgcttggctggcttgcttaggacctctgctgcctgggtgcagttgtctgcgtgcctatcagatcccaggctccggccccagaagggaaagccgcttaagaagcttccggtttgagcagccaagatcctgcctttcgagctgaagggctctcctgctgccaagatgcctttgcctcagacaggggcccctgggccagaggtaaaaagccccagggagcctaggaagtcacagaccctccctgtgaccacctggaagtccaacagtatgaaagagcagagcgtgcaccacgggggcagcttgagacccagcctgggcatgctgaagcagaccctcttccggaccagcctgagaacttcaacccacaagcccaaggaggacccaggcctgttcaggcgcagctcccgtttcctgttcaggtccttgagacgggccatagatgaaggcttaactgctgggcatccccaaggccctgcggtaccagagaagccctccaaagtcacagatggcgtcagcaggcaggcagccactgggacagaggctgaggatctggaaccccaggcagaaagtaaatccgtggcagacctcatcactgagcggcagctagtgaaggcctttgaacaattgcggtacctggagacgcagctggtagccgacaaaacttcccgcacctttacacaggaccccaccgcctatgctcggcgcgctatggacctttgtctacattacgacggaatggctgcggagatcggagccattgtgcgcgaggcgctgagttccgaaggcgtggatcgagacgctctagcggaactggcccaagtggtacacttggaagaggaggcccatcagacctcccaggccgagggtgatttcttgagtacaccccgccactggcgtatgcattgggaggacgcggtgcgtctcagcgctcaggagagcgtacagcaggcaggcgcaaaagtcatccccggggctgcggagggctcatccgacctagcccagcttctggctgagctcggcggtgtggttcgccacgacctgcagaaggtgcgcttagagatgcagcccgcttacgaagccaccgacttcccagtgtgggagacctacttgcgtgccttccacagcgctgtggcccagcgtctacaggagctggcgcgagacgcccgcggctgtgagcagctctatgtgctgttagactgggccgctaatgtctatggcagtcctgacttcctgggcgccccagacttggcgctgcccaccgagccgctgcccccacttctagagcctgctctgtgggctcgactggaaagtgactacactagcttcctagagaccaagatcacaagctgttttgacagcatcttgcagctggaacagaatcgctgggaagccgacgaggaccgggaagtactgcagggcctctaccacgcgcccctgtccatcgatgtgcacatgctggtagctgagcatgtgaaggcagctggcgctatctccgcggagctggaggccactaccctgcagatctgcgcgcgtgcgctctgtctctttgtgcccaggtttgaaaaggcttttctggcgtcgaaggcagtgagcgaatggtacctgggtgcttacattaacgcctgcgtggagctgagaaccagtcttctggccaggttcccaggaaccataaaggaactggagaaacccctagtggctgccaccaatagcttccagaaacatttgctccagattgtacagcaagacatgcagcctctatttaaggtgctatataccaagagctggctcacacaggacacacttcgtcccctcatggacaaagtggtggactttgcacatcatcttgagcatgtgaccccaccactggcacaggagacactgcaggaggtgcaccgttttgtggtccgcgaatacctggggcaggtgctgaggccccacgagaggttcagtggccaggatcgactgaagggctctaataagatgaacctggatgcccaggccattagcaacaccttccagggcttgggctctgaagccaagtggctggaccaagccatcctgtctgtggctgagatcctgggcgagacatacaaagacgacatccggcggcacctggaaacacttatacggagctacccggacatcaggcgagaccacattctggccattctggcactacgcagactcggccgccgccggaaccacaatctcttgcaacacacccaagacttgctgagggctgcccacgagaccaggctcccctcacaccacgtgctcttcgaggagatcgaagtgcccacctctgtggacgtgctaatcacctgcatctagggctgaagggcgagcaggagcctcgttggccgaggatctgtcaccctctccatgactgaccccaagttgggagcccagtgagtcactctggccctacccccagcactgaagcctggggacatggaatttttggtctcagctgcctggctgctcagccagaggagccaggagatgaggcattccgggcatttgtgggggagtcttttggggctgcggagtctcctttcaggacttcaggccagggaaggcttccctttctaactgctcagcacatccacactgtagtgcgaagctgaggattctaaaaataaatgtgaattaaaatagtgtaaaaaaaaaaaaaaaaaaaaa

SEQ ID NO: 86 - DNA, 1654 bp, Mus musculus
gcaggtggctttcagggagagctgtgaatgctggtgtttacaaaaacaagtacaaataccatagcatgcttaaagttctcgagaacagttgaggtcatagacttatttcttcttccctttctccgtgtggtagggtctccccacctccctcagcgtccccagagtccacccagacttcctaggtttttgtcccagttttaatttccccaccgccttctcttgcttgtatctgcattgatcatttggagccggagaaggaaccagatcctaggcatctgtataccctctccaccccgcgtgtggagtaaaaatggccattttacgtaatgtggctttcttttctatctatttctttcagcaaatctcaggcaagagctttgatttttccaggaagccaccctaaagagtcatacccttgtgcttcttccccgcccctacccccgcccccccccccgccccttgtataaagtcaacagtttaagttcaggatgctgttgtcccgcccaccagaggatgctggcttagagtttttttgcagtgtgcaaagcacgtgccaccggtggtactcaaggcgatttctgatttaaaaaaaaaaaaaaaatgatggtaaatagcgctgaatttcgaagaaggcttcctgctttatcctttctcagtctttgctgctgcaaggagaatgtctctcttgggtaccagtgggtccttcacaccttcccacaacaccagtcattgcccaccgtagcaaagagacagtggccttcaggtccagtcttggtctccatagacctcagtgacattgtttcgttcttatagtatttgtttataggcttctgcacagacagacagacagacagaagctctgtatcatttaagcaagtaaattcagagagagatttaaagtgattatggttaacaggtgatatttatggccaaataaaatctccaaaactaatgtcagaaacacagcgacacgaacttgaatagaaaagaggcatcccgttttattgaatgagcaagtgatcaagagtcaaaacacctgtctcaatgcctttggggagggggggatctcaggcaacccaggctggccttgaattgctatgtaaccagggatggccttcttctgcctctgcctttccagtgctgaggtcacaggcttctgctgcctctcccagaccctgcatttacttccatgagattagctacgagagttgattttagacaagtttcttctgaaaaaaatggagataaaagctgctacctccttacctcatactgttatgaaaattaattgctatcatgaatgtgcccctgaggcggggagactctgtgcactaaacaaatatgaagcacattgatagtggattgaaggtgtttgggaaaacactgggtcctggggcggggggcttggtggcgaggggggagggaggttggtgggcacaggactccacccaggtatgtcatgagaaaacccttgtcccagaaggagactgacttagggacaggaattctcagcatacagggatgccaccaccattccagcatattggatcctgattcttatatcctgtttgtgtgtttcagtccctggtctttccccaaatcaaatggaaaggaagtgttgttgagagagaacggaataaaaacggctttaagt

SEQ ID NO: 87 - DNA, 6608 bp, Mus musculus
ccaacgcgcacccggcccggtgcggctcctctccgctaggctgcgcagggcaccgggcgaccgaggagggaccgcgtcgcccctccctccccctcctcgcccccacctctcgctctccccgcctttgtctcccgcgcccgccgccggctgccggagccgctttgtgcggcgcggccgcggctcagcatggacgtgacggtgtcgcagctcgttgagctgtttctgcagagccctctggtgacctgggtgaaaacttttggatcgtttggaagcggccaccaggacaacttgactctgtacatggatttagtggacggcatctttttgaatcaaatcatgctgcaaatagaccccaggcccagcaatcagcgcatcaacaagcatgtcaacaatgatgtcaacctgcgcatccaaaacctgagtatcctggtgagaaacatcaagacctactaccaggaagttctccagcagctgatcgtaatgaatttgcccaatgtcttgatgattggcaaagacccgctgtctgggaagagcatggaggagattaagaaggtcctgctgctggtgctgggctgtgccgttcagtgtgagaggaaggaggagttcattgagagaatcaaacagctggacatcgagacccaggctggcattgtggctcatatccaggaggtgacccacaaccaggagaatgtgtttgacctgcagtggctggacttgccagatgtggccccagaggagctggaggccctctccagaaacatggtgttccacctccgcagactcattgacgagcgtgacgagtgtaccgagctgatcgtggacctgacacaagagagggactacctccagacacagcagcctcccagccccggcaagttctccagcccagactccacaccaagccccaccagcagcctgtccagtgaagacaagcagcacctagccgtggagctggctgacaccaaggccaggctgcggcgtgtcaggcaggagctggaggagaagacggagcagcttgcagacaccaggcacgaggtggatcagctggtcctggagcttcagaaggccaagcaagataatattcagcttgcagctgatgcgcggtcagcccgggcctatcgggatgagctggactcgctgagggaaaaggcgaaccgtgtagagaggctggagatggatctggtacgctgcaaggagaagctgcacgacgtggacttctacaaggctcgcatggaggagctgagggaagacaatatcatcttaatcgagaccaaagccatgttggaggaacaactgactgcctcccgggctcgcagtgataaagtccacgagctggagaaagagaacctacagctaaaatctaaactccatgacttggaactggatcgggatgcagacaagaaacaaattgagaagctgctggaagaatacatggttctggagatggctcagaagcagagcatgaaagagtcggcccaccttggctgggaactggagcagctgtccaagaacgcagacttgtccgacgcctccaggaaatccttcgtctttgagctgaatgagtgcgcctccagccgcatcctgaagctggagaaggagaaccaaagcctacagagcaccatccagggtctgcgggacacgtcgctggcgctggaggagagcagcctcaagtatggggagctggagaaggagaaccagcagcttagcaagaagattgaaaagttacaaacgcagctggagagagaaaagcagagtaaccaagacctggagacgctgagtgaggagctgatccgagagaaggaacagctacagagtggcatggaggccctgaaggcggacagggccaggcagataaaggatctggaacaggagaagggccacctccaccaggctgtgtggtccctgcgggagaggccgcaggtcaacagcacgaaggatgtggagaaggagaacagagccctccaccaggctgtgacagaggcgggcagcaagctcagccagctggagttggagaagcagcagctgcacagagacttggaggaggccaaggagaagggagagcaggcggaggcgctggagaaggagctgcaccggctggagaaggagaatgagcagctgaccaaggaggtgacctccctgaaggcagccactgagaaggtcgaggccctggagcatcagagccagggtctggagctggagaaccgctcgctgagaaagtccctggagcaggaggtggcccagctggagaaggacaagaaactgctagagaaggaggccagacgcctgtggcagcaggtggagcttaaggacgccatcctggatgacagcgctgccaagctgtcggcggccgagaaggagagccgtgcgctggacaaggagctggcccgctgccgggacgtgggcagcaagctgaaggagctggagaaggacaacagggacctcaccaagcaagtcaccatgcacacgaggacgctgaccaccctgagagaggacctggtgctggagaagttgaagagccagcagctaagcagcgagctggacaagctgagccaggagctggagaaggtcggcctcagcaaggacctgttgctgcaggaggatgacggtcacggtgacggaaaaggcaaaaccgaatcagccttgaaaacaacactggctatgaaagaagaaaagattgtgtttttggaggcacaggtggaagagaaagagagcttgagtcgccaactccagattgagctgcagatgataaagaaagaacatgagcagctgaggcagacccaagagggtggagacaaggcacagaacgcactgaagcgccctccgggcaaggtcaccagtcaccaagagaaggaggcctgggagcccagccataaagaggccaccatggagctactccgtgtgaaggaccgggccatcgagctggagcgcagtaacgcagctcttcaggccgagaggcagctgctgaaggagcaactacagcacttggagactcagaacgtgtccttcagcagccagatcctgaccctacagaagcagagcgccttcctgcaagagcacaccaccacgctgcagacccagactgcgaagctgcaggtggagaattccacactgagttcccagaacgcagcgctcagtgcacagtacacggtgttgcagagccagcaggctgccaaggaggccgagcacgagggtctgcagcagcagcaggagcagctggcagccgtctatgaagccctgctgcaggaccacaagcacctgggcaccctgtacgagtgccagtcctcagagtatgaggccctcatccgccagcacagctgcctgaagacgctgcacaggaacctggagctggagcacaaggagctgggggagaggcacggagacttacagcagcgtaaggcagagctggaggagctggagaaagtactgagcaccgagcgggaggcacttgagcgggagcagaagaccaacgccattgccacgagcgagaaccagaggcttcgaggagagctggacaggatcagcttcctgcaccagcagctgaaaggggagtatgaagagctgcacgcccacaccaaggagttgaaaacctcgctcaacaactctcagctggagctgagccgctggcaggtgcgcttcgacgagcttaaggagcagcaccagagcatggacatctctctgaccaagatggacaaccactgtgagctgctctcccggctcaaggggaacttagaggaggagaatcatcacctgctgagccagatccagctgctgagtcagcagaaccagatgctcctggaacagaacatggagagcaaggagcagtaccacgaggagcagaagcagtacatagacaagttaaacgccttacggagacacaaggagaagctggaagaaaaaatcatggatcagtacaagttctatgaccctgctccaaagaagaagaaccactggattggagccaaagccctagtcaaacttatcaagccaaagaaagaaggttccagagaacggttaaaatccaccacagatagccccccctggcagctggagccctcagaccctgcctcgccatctccctctcaggctctcagatcgcagacggagaaccccgacaaccccccatcgggtccaaactgtgtggaagaacgagacacccacaacgggcctgtggggaaaggcccaggggatctaaaaccaaaacgagggtccccgcgtggaggcagtgttgaccgcacagacacctccactgacccagctgtgaagtcctggccctcggagcctggctcccggaccttttcaacctcagccgtgatgacctgcttagtgactacttccgaaaggcccatgatcccccagccctgggaggccagccaggaccaccagctaggaaagatggagccaagatgcccaccagcttcgtggctcccaccatcaagatgtcaatcaacacctctgaggggcagcagctgaagccagggcattatgtaaagcccaacctgagaccatctgaggccgaggccctggctgggatgccttcaagacaggtccagcctccccagagcctgtctctgggtagacccaggcaaaccacgatgacccagaattgtcacatgcctgtcagccgaagtgcgtctctgagcagagccttcagcctggcttcagctgacctcctccgggccagtgggccagaagcctgtcggccagagtctcctcagaagccagggggtcatgaggctgcaggagccagagagacaagcacccacagcctgcaaggctcccacatcctagcccgggagagaacgccaatcgtaggaaaagctgacagtccctctccaggccagggtacccgaggccggccactggacacaagacgcttctctctggcccccccaaaggaagagaggctggcccccctacagcagtctgccacagccccagcccttgctactggatgtagcagtggtagcaacccccagatccagcacttttctcctacagtggctcctgcagtcaggacaaaatccaaagtgccacaacactcaggggaggtagccaccgtagctcctgtgcgtccagggctcggcacctcagagggagatgggggcccagggcatggttacagcgaagggcttctgaccaaaagccctggcaggtcttctgacttgcctccccatgtcaaaaggggccccgatgacttcagtcaagggagcagttcaaagagcacaccggcgtccccagagccaggtggggacccgcagacagtgtggtatgagtacggctgcgtgtgactcgcatcgtggatctgcagcttgcaaatgctaaactactggtgcgccttctgattacaatggcctttccccctgtttgcctgtggtggtggtggggggaagggtgaaaaatgaggagtggagttcccacggtcatcctgttggctgaagggaaacactgtgccaagccctaagaggattaccctccagggtctgtaacttattttctgtagctgcggcttccagcagctggcatcttatggacaaggccgtttagcatgggagccagttaggagtcagtggcaaagcgactttacccagaaacagacactacttgagtaggaatgctcgtttgcaacctgtcaacctccactaaatagcatgtgcacgtgtgagtacatgcacggacgccaggttcacaaagctacgtcctgatgggtctcgaaactccactcctgcctaaaagccattggtcctgggaaaggcttagactgggcaaaccacaaagatttgcagggttttggggaaagcccagagcagggctggctgctaaacccaggacccttgccatcctatttctgaggtccaagcacttccctttaaaacaggaccaagtttcaggatcagccacgggtcttagctctcgtagctggctgttgggccctgcctagtgggctttaagactacctaggaaccagccttttgggacttcccaggcttgctttactacaaacactggatctgccaggcctagggtgtgaggcaaagagatgccctacgagtatcccagtctggcaggcatagttactacacagaaggaaggccaaagccacacttgctttgtaatgtggctgttgcacccagcccttcttggctcaaacaattttttttatttctgaataactttttgggggtagaaaccaaatttctatatacacatacatacacacacatgaatatgtgtgtgtgtgtatacatatatatgtatatgtacacacacacacacacacacacttacttttgagggcctatttatgttctgaaagtcattctttcagtagtctgacctgctgtttgttcgtttgtctggtctacttcctgacatgttttgtttcctattgtaatggtgcttttcctgggatggactaaacgatttattttctgttttgatgtaatgtgctgaagaagaaacgggggagaccttgaatgttaacaggatccatggtgagggtgttggggttgtgtgttaaatagccattcgttctggaagaccaggacagggctgtaataaagtggaaaggaatgtgaaaaaaaaaaaaaaaaaaaaaaaaaaaaaaaaaa

SEQ ID NO: 88 - DNA, 2231 bp, Mus musculus
aggcagcgtggctcgagtcctccggtccggctcgcgtggttgatcatctcctggcgtaaccttggcccgctgtggctgggagactcatctgcaggtatctgggccttctggtccgcacggcctcccgggcgagcggcgcgatggcggaagcggcggcggcgggcgccagcggagaaaccatggcggcgctagtggccgcagaaggttccttgggcccggcgggctggtctgccggccggagtttctccaactaccggccgttcgagccccagacactgggcttcagcccgagctggcggctgacgagcttctccggcatgaagggctgaggctgcaaggtcccccaggagaccctgctcaaactcctggagggactgacgcggcccgcgctgcagcccccgcttacctcgggtctggtcgggggccaggaagagacggtgcaggaagggggcctgtccaccaggcccggccccggctcagccttcccctcgctgagcattggcatggactcctgcgtcatccccctgaggcacggaggcctgtcgctggtgcagaccaccgacttcttttaccccttggtggaagatccctatatgatggggcgcatagcttgtgccaatgtgctcagtgacctctatgccatgggtatcactgagtgtgacaacatgttgatgttactcagtgtgagccagagcatgagtgaaaaggaacgagagaaggtgacaccgctcatgatcaaaggctttcgtgacgctgcggaggagggaggcactgcagtgaccggtggacagacagtggtcaacccgtggattatcatcggtggcgttgccacggtggtgtgtcagcaaaatgaattcataatgcctgatagtgccgtggtaggagatgtgctggtattaaccaaacctttaggaacccaggttgctgccaatgcccaccaatggctggataatcctgagaaatggaataaaatcaagatggtggtttccagagaggaagtagagttagcctatcaggaagctatgttcaatatggctactctaaacaggactgctgctggcttgatgcacacttttaatgcccacgcagccacggatatcacaggctttggcatattaggacactctcagaacctggcaaaacagcaaaaaaatgaagtgtcctttgtcatacataatctgccaataattgccaagatggctgcgatcagcaaagccagtgggcgctttggcctcctccaaggaacgtcagctgaaacctctgggggattactgatttgtctgccaagagagcaggcggcccgcttttgttcggaaatcaaatcttccaagtacggagagggtcaccaagcttggatcgttggcatcgtggagaagggaaaccggacagcccggatcattgacaagcctcgcgttattgaagttctacctcggggagcctctgctgctgctgctgctgctcctgataattccaacgcagcctctgagcctagttcttgaaatggaatagcggttgttgggaactcggagccattctacccgctcagggactgctggccagggttgattttaagacctttccaaaggctgcttgcatggttcctccaggcccatccaaagcttcctgtatgtgcatccaggcctgtgagtaatggcgctgcggatgtgtgttcatctgttgagagcatgaggagcaaaaacccgtttcccaaagcaagaggaggctatttcagttttagggatttttttttttttttttttttgcactgagttgattcatttctgcacagggagtaaagattattaagattacatatgagaaaagtaaacctgcaacatgaaaaattatttggaccaatatattgataaatctaaattgttaggagaactcttactgatttattgtcaaatttgttattaatttttttctgagaaactgcctcttttcctgttctggacaagagttgagcagcttgtccgacaggaaaggaagactagccacctgacttggtctctgataatgatgtctctccctctaactcccagtaaggactgggagaggctgaacaaacctcagagccaggtgtcggtggccattgaatcttacactgaaacttctggagatttaattaataaagagaatttcttacagtaactaaataaaagggactttgttggaaaaaaaaaaaaaaaaaaaaaaaaaaaaaaaaaaaaaaaaaaaaaaaaaaaaaa

SEQ ID NO: 89 - DNA, 1681 bp, Mus musculus
ggagcaacttggcgctctacttgctgtagggctctgggtgatgggagaagagcgggagggcagctttctaaccatataagaggagataccatccccttttggttcatcaagatgagtaagtcctcaggcggctacacgtacacggagacctcggtattatttttccatttcaaggtctcaaaagattcaaagtccaagatggcaaccctcaaggaccagctgattgtgaatcttcttaaggaagagcaggctccccagaacaagattacagttgttggggttggtgctgttggcatggcttgtgccatcagtatcttaatgaaggacttggcggatgagcttgcccttgttgacgtcatggaagacaaactcaagggcgagatgatggatctccagcatggcagcctcttccttaaaacaccaaaaattgtctccagcaaagactactgtgtaactgcgaactccaagctggtcattatcaccgcgggggcccgtcagcaagagggggagagccggctcaacctggtccagcgaaacgtgaacatcttcaagttcatcattcccaacattgtcaagtacagtccacactgcaagctgctgatcgtctccaatccagtggatatcttgacctacgtggcttggaaaatcagtggctttcccaaaaaccgagtaattggaagtggttgcaatctggattcagcgcggttccgttacctgatgggagagaggctgggggttcacgcgctgagctgtcacggctgggtcctgggagaacatggcgactccagtgtgcctgtgtggagtggtgtgaatgttgccggcgtctccctgaagtctcttaacccagaactgggcactgacgcagacaaggagcagtggaaggaggttcacaagcaggtggtggacagtgcctacgaggtgatcaagctgaaaggttacacatcctgggccattggcctctctgtggcagacttggctgagagcataatgaagaaccttaggcgggtgcatcccatttccaccatgattaagggtctctatggaatcaatgaggatgtcttcctcagtgtcccatgtatcctgggacaaaatggaatctcggatgttgtgaaggtgacactgactcctgaggaagaggcccgcctgaagaagagcgcagacaccctctggggaatccagaaggagctgcagttctaaagtcttccccgtgtcctagcacttcactgtccaggctgcagcagggcttctaggcagaccacacccttctcgtctgagctgtggttagtacagtggtgttgagatggtgtggggaaacatctcactccccacagctctgccctgctgccaagtggtacttgtgtagtggtgacctggttagtgtgacagtcccactgtctctgagacacactgccaactgcaggcttcgattacccctgtgagcctgctgcattgctgccctgcaccaaacagcctaggccgacgagttcccagttaagtcgtataacctggctccagtgtgtacgtccatgatgcatatcttgtgcataaatgttgtacaggatattttatatattatatgtgtctgtagtgtgcattgcaatattatgtgagatgtaagatctgcatatggatgatggaaccaaccacccaagtgtcatgccaaataaaaccttgaacagtg

SEQ ID NO: 90 - DNA, 3287 bp, Mus musculus
gcaacatataccaagtcacttcaaccagttattttgtgctactttgtttttacttagcttaataatgcctgtttctattaagaggtagttatgtttaaaatggaagttttccctacaaaaggatgttgagatttttgtttgtttttctgctatctatctgtctttgcaaactttgagcccttcctcttgccttaaagcatggaactgggtgctgctacgttattacctggagtctcattttgcttatggcaggggtggtagcaaaaatgtggaaatgttgatccaccatcacaataggcgtgcactttgtaaaggcagcccaacaacggagcaacctatcttcagcactcgagctcatgtcttccagattgacccgaacacaaagaagaactgggtacccaccagcaagcatgcagttactgtatcttatttttatgacagcacaagaaatgtgtataggataatcagtttagatggctcaaaggcaataataaatagcaccatcacaccaaacatgacatttactaaaacatctcaaaagtttggccaatgggctgatagccgggcaaacactgtttatggactgggattctcctctgagcatcatctttcaaaattcgcagaaaagtttcaggaatttaaggaagctgctcggcttgcaaaggagaagtcgcaggagaagatggagctgaccagtaccccttcacaggaatcagcaggaggagatcttcagtctcctttgacaccagaaagtatcaatgggacagacgatgagagaacacccgatgtgacacagaactcagagccaagggctgagccaactcagaatgcattgccatttccacatagttcagcaatcagcaaacactgggaggctgagctagctaccctcaaaggcaacaatgccaaactcactgcagccctgctggagtccactgccaatgtgaagcagtggaagcaacagcttgctgcgtaccaggaggaagcagagcggctgcacaagcgggtcactgagctggagtgtgttagtagtcaagcaaacgctgtgcacagccacaagacagagctgaaccagacagtgcaggaactggaagagaccctgaaagtaaaggaagaggaaatagaaagattaaaacaagaaatcgataatgccagagaactccaagaacagagggactctttgactcagaaactacaggaagttgaaattcgaaataaagacctggaggggcagctgtctgacctagaacagcgcctggagaagagccagaacgaacaagaggctttccgcagtaacctgaagacactcctagaaattctggatggaaaaatatttgaactaacagaattacgagataatttggccaagctactggaatgcagctaaagagagtgaaatttcagtgccaatagatggagagatgctgtctgtcttcctaggactgtttgggctccgtaccaagattgcacaaaattttttgaatatcattcctccaggaggagggtgttttgaaaattggaattgtatatttcagtataaattttagaatttagcttatagctagttggggaaaaaaaaagacatgaaaaacttgaactacaaattacctccatgtatattggccatagttaactggaaagttataagtagacactttaatgcaatcttttccccctgatattagccaatgggagaattaacaatgtctgggtcccttctcctcttttgttcaacacagtgaagattatatgctttttaaatttatttatgatatctacagctgtgttttgtgcaaaaacttagtaatggaagccctgtctttgttgttatctgaataatttctcaggataatttttcgctgctgagaaagggccattaccaattaatccttgccaggagttggggagctatgcctctaagtgaaactcactatcaacgggtgtctggagttcttccctttttgtactgagagtgttttcactctagtgactactctggtacactctgctatctccaatcttgtctgttatatagtttacttttccatattgattccatgtatttatgagaggatactgtctcccagtttattatacattttaaagccaactaaacaaaggcagctgagtccctcagatatttttctttttaaatttatagtaaatttgacacacagaactgaaatacagcagtccgtccttgacggtttagtctagcaatgttaagtatatttacagaaaatatgcagttacatttatttatatatttggcaagaaatcttttctgagtgatcaatgcatttcaatttatgaaaaataatggttagggggcactgtttattatagataattttaaggtatataactgttttcaaggacggccacttccacctagcggtcaagccgagaggactgcatctaaattgtgactgtggcagatgggtcttcacagaaaccatgtctttattcaaacttcacaaggctatattttgaactgttaactaggcatttcaaaacaggagataccttcaacagactcttctccaagagcaggttttactgtttttttgatgtaattttaagacatttagcaaacatgcatttctttatatgatacatttctttcacaaaacaatttaaaagtaagccaagtgctgcctgctctgcgagtaggaactgcatcagaatcgtgtatcttgctgtacaatgcctgtgatagtgaagagggttcttcttagtgtatgcttgggtacctaactctggagtcaatgaatgcacccaattttttttgtttgtaccccaaatgattgaattgttaaatacaaattaagcagattaacccatctttctcactcaaacagattctttagtatgttttatatttatgtgtatgtatgtcaatacatacatactaatttatattagaatgaaaataaatcgtttgtttctaaaggtagtttctacagtaaggtgtctctgacacatgtgtatcagacactggaccaccatgtattctctgtgctattccatcctgcctgtcacctccatcaaccttagggtatttccctcacctgtctattatagaaggaatcttttgggtacacatgctcagagatgagatacttctctgagaaatcaggtaataaaatttatttgatggatagaattttgaaaacatatgattttatctatgagtttctgaatatcaaagaataccacgttttcatttaaatagaggactaacactagggatcagggaatttagttatgaagagtttcaaaaaaaa

SEQ ID NO: 91 - DNA, 2833 bp, Mus musculus
cgcgccctgttccgtgccttgaggttgcggtcagcgcgagccgctgcaacgagtcggggccgcctgtgagcgtgaggctgcaaccctctcctcccgccgacgcatctccaaccgggactccgcccgcctcgctccgggcccaggccccgttgcaccccgcccggcgccggacagcaaagccgccgtcgccgcgtcccgaggatcctacagccgccgccagcgccgcccgccgagcaagatgggaaatgaggcgagttaccctttggaaatgtgctcacactttgatgctgatgaaattaaaaggctaggaaagagattcaagaagcttgatttggacaattctggttctttgagcgtggaagagttcatgtctctgcctgagttacagcagaaccctttagtacagcgggtaatagatatattcgacacagacggcaacggagaagtggacttcaaagaattcattgaaggagtgtctcagttcagtgtcaaaggcgataaggaacagaagttgaggtttgcttttcgtatctatgacatggataaagatggctatatttccaatggagaactcttccaggtgttgaagatgatggtgggcaacaatctgaaagatacacaattacagcagattgtagacaaaaccataataaatgcagataaggatggagatggaagaatatcctttgaggaattctgtgctgtcgtaggtggcctagatatccacaaaaagatggtggtggatgtgtgactctttgaagaataccacccaacacttttgctttcttctccatctctgaagatctgctcaagacgtccagcaatgctctctgtgtatttaaatggaagtatttttctctgtgaagccacattttccaacatgagcctcatgaagccaactaagtgttattgaactcctactctctcaataactcagtgtagcactttaaagtttgaaggacagcagcatgaaagagcatatcagtatggtggagaaagggaaggggttggctctttaatttatttttcttcatcttttataacaagaaagtatctatatatacatatgtaaatatttatatatagatatatgtagctttctatatatttagtaggttggctttaatttaatatacttgattcagaaacaaaatgttagagtacaaaagtgccaagcagaacataaaccatccttacttttatttcacacggttttatatgtagatagaagattgtacaatttgcgccaggtattaggccagctcttttcctttctctgtgctttctcctttgagagattgataaagcatttgttaatgccctattatttaccttacacttttgtaacgagtctgtaactttatttatatctctgactatctttccagggactgtgtcttattgctgagcagcgtttaatccatctctgttggaggtctagttcagtgctgttgccaagagtgggttcttgtgtccatagaactgcatatgctatggctgcttcaggctgatactttttaagtagtcactgttatttttattaagtgtccctgagaaaatgtaattagcagttgtgattttataaaggtcagaagttttctgaggcagtcatgacttttttaaatgtattatttagtgaagaaaacccaaagtaatcatgcagtggcttaaaatatccttgttccattatacacaagggaaaccatgtgaaatacttgtcactgaactgtaaatcatggactcatttttcttctgcatttcaaaagacacagttaacctaaaaaaatgaactgatacttcatgagcacatgtttatgtaaaattccgtctgtggttaagatgggggagtatcttgctaatctacacgccacaggagagcagattttgtccatagtcacatctttaaaatttctctgccagatatcggcaagatagcacatgatggatttttgttttgcccgtacaactagtgatggatgatgatttaatagatttgtgtgacataaaagtgcgtcatgtcctaccacttgacattatcccttcccttttctgcaaaggtactgttgatcggaagaaagagattctggctagttttatatggcagtcttccctacacagtttttctataccaattggttttataatcatgaatggtaaagggtgggttgaatcaaggtgagagaatattaaattgagtctacctgcctgccaccgctgtcccttcaactgagtgctgcacatcatgggctctgtctgtgagagaaaccccggtgcttggtgtctctgcatgacatggagttttgcatgtagatcaatttaaaatgtacctcttgtttacataatctgcataatttaaaaagatgatgttgccaaactttggaaatgttaatactcaaaacgaaaatctccactccatgtaactactttctccctctggatcagtacatggcttgcaatcccagccagtggtttgatctgtcccagtgtcaaccgccatgtgctctgcttcaagagggaactagtcttttgtgaatttttttgtacataattatttgttacaaatattttagcaaatgctttctatatctcttgcttgtgcatatcttggctggcgttgtggaaaaaaatagtgcaaactatttcaaactatttccttactggggaatgaggggttttcttttttagtttgtgtgagggaggtggggagggcatggtttatgttgaatgtttaaattttcttctgcatgatacatgtcatgttgtgaaatctttagagaacttcatactgtatgagtaagaaaataaaatatttgaaacttgaataataaaaaaa

SEQ ID NO: 92 - DNA, 2054 bp, Mus musculus
gagatctcaccgagacccgtgaccccgactctacgtgagacgtacagcccaaactcatcatgcgcgagtgcatttcagtccatgtggggcaggcaggtgtccagatgggcaatgcctgctgggagctctactgtctggaacatgggattcagcctgatgggcagatgcccagcgataagaccattggtggaggggacgactccttcaccaccttcttctgtgaaactggagctggaaaacatgtgcctcgggcagtctttgtggacctggagcctactgtaatcgatgagatccgaaatggcccataccgtcagctcttccacccagagcagcttatcactgggaaagaagatgcagccaacaactatgcccgtggtcattacaccattggcaaggagatcatcgacccagtgctggaccggatccgcaagctgtctgatcagtgcacaggacttcagggcttcctagtattccacagctttggagggggcaccggctctggcttcacctctctgctgatggagcggctttctgttgactatggcaaaaagtccaagctggaattctccatctacccagccccccaagtgtccacggctgtagtggagccctacaactccatcctgaccacccataccaccctggaacactcagactgtgccttcatggtggacaacgaagccatttatgatatctgccgccgtaacctagatattgagcgtccaacctataccaacctcaaccgcctcatcagccaaattgtctcctccatcacagcttccttgcgctttgatggggccctcaatgtggacctgacagagttccagaccaacctggtgccctaccctcgcatccacttccccttggctacctatgcaccagtcatttctgcagagaaggcctaccatgagcagctgtcagtggcagagatcaccaatgcctgttttgagcctgccaaccagatggtgaaatgtgaccctcggcacggcaagtacatggcctgctgcctgctgtaccgtggagatgtggtgcccaaagatgtgaatgctgccatagctgccatcaagacgaagcgcagcatccagtttgtggactggtgccccacaggcttcaaggttggcatcaactaccaaccacccactgtggtgcctgggggtgacctggccaaggtgcagcgtgctgtgtgcatgctgagcaacacaaccgccattgctgaagcctgggcccgtctggaccacaagtttgacttgatgtatgccaagagggcttttgtacactggtatgtgggtgagggaatggaggagggggagttctctgaggctcgagaggatatggctgccctggaaaaagattatgaggaagtaggcatcgactcctatgaggacgaggatgagggagaagagtagaccgctacttggagcctgttcactgtgtttattgcaaaatcctttcgaaataaacagtctccttgcatggtttcttgtcccctttgtaactgcttgagcctctgcttgtccccctttctgctttggctgctacctcccgctattggccgcttgtgaccttttaattttaccttcacatggctgacagtgagacttgccaagggggccccatattgagccccagaaagcaggaacccaaggacttcaatgtaaggtcctaaggactcgcagaataggaaagaaacaaggaccaaaccctggacctgtctgtctagctacaagctattgcaagatacaagtcttcactttctgaaatatctgatagtctgtgttggatgattggactactttattcttcttgctgctgcttcactcaacagctctagaaggcttggcccaggcgtcattgaacactgaggatttgggaatgggggctgggcgggcccaaagttcccgggcatacagccacctcacaaacttgggggatgggcaggaacaagggcaatctagttgtttgtgccacagcacctctggcagctttgcatagcttgctgtctatcttgctttctggggctggagccatgctattaaaagtcaggtcgtctcccc

SEQ ID NO: 93 - DNA, 1498 bp, Mus musculus
gcacaggcatccatcgcccctgcttcgtccggcatcccgcccgctgccgccgccatgcccttctccaacagccataatacgcagaagctgcgcttcccggccgaggatgagttccctgatctgagcagccacaacaaccatatggccaaggtgctgaccccggagctgtacgccgagctccgtgccaagtgcacgccgagcggctttactttggacgacgccattcagactggcgtagacaatccgggccacccgtacatcatgactgtgggtgcagtggcgggcgacgaggagagttacgacgtattcaaggacctcttcgaccccattattgaggagcggcacggcggctaccagcccagtgatgagcacaagaccgacctcaacccagacaacctgcagggtggcgatgacctggaccccaactacgtgctgagctcgcgagtgcgcacaggccgcagcatccgcggcttctgtctccccccgcactgcagccgcggggagcgccgcgccatcgagaagctggcagtagaagctctgtccagcctagatggcgacctgtctggcaggtactacgcgctcaagagcatgactgaggcggagcagcagcagctcattgacgaccacttcctcttcgataagcctgtgtcgcctctgctgctggcctccggcatggcccgcgactggccggatgctcgtggcatatggcacaatgacaataagactttcctggtgtggattaacgaggaggaccacctgcgagtcatctccatgcagaaggggggcaacatgaaggaagtgttcacccgattctgcaccggcctcactcagatcgaaactctcttcaagtccaagaactatgagttcatgtggaatcctcacctgggctacatcctcacatgcccatccaacctgggcaccggactgcgggcaggtgtgcacatcaagctgccccacctggggaagcacgagaagttctcggaggtgctcaagcggctgcggcttcagaagcgaggcacaggtggcgtggacaccgctgctgtcggtggggtgtttgatgtctccaacgctgaccgcctgggcttctcggaggtggaactggtgcagatggtggtggacggagtgaaactactcattgagatggagcaacggctcgagcagggtcaggcaatcgatgacctcatgccggcccagaagtgaagcctggccctcgccaccatcaggctgccgcttcctaacttattacccgggcagtgcccgccatgcatccttgatgtttgccgcctggcggctgagcccttagcctcgctgtagagacttctgtcgccctgggtagagtttatttttttgatggctaagctgttgctgacactgaaaataaactagggtttggcctgccctaaaaaaaaaaaaaaaaaaaaaaaaaaaaaaaaaaaaaaaaaaaaaaaaaaaaaaaaaaaaaaaaaaaaaaaaaaaaaaaaaaaaaaaaaaaaaaaaa

SEQ ID NO: 94 - DNA, 1985 bp, Mus musculus
atgagctcgtacttcgtgaacccgctgtactccaagtacaaggcggcggccgcggcggcggcggcggctgcggcggccgcggcgggcgaggccatcaatcccacttactacgactgtcattttgcacccgaggtcagcggccgccacgccgccgccctgcagctctatggcaacagcgccgccggcttcccgcacgcgcacccgcacccgcacccgcacccgtcgccgccgcccgggtgcggcggagggggcggcccggggcccggccaggactacttccacgccggcgcgggcagcccgaccgctgcctaccaggccgccccacctcctccgcaccctccgcctccgccgccgcctcccccctgcggcgggattgcctgtcacggggagcccgcgaagttttacggatacgataacttacagagacagccgatttttacgacccagcaagaggccgagctggtacaatatcctgactgtaaatcgtccagtggtaatattggcgaggacccagaccacttaaatcagagctcgtctccttctcaaatgtttccctggatgagaccacaagcagctcctggtagacggagaggaagacaaacctacagtcgcttccaaaccctagagttggaaaaggaattcctttttaacccttatctgaccaggaagaggagaatcgaggtctcccatactctggccctcacggagagacaggtaaaaatctggttccagaacaggagaatgaaatggaaaaaggagaacaacaaagacaagtttcctgcgtcccggccggaggcaaaggatggagaccccaaaaaggaagtctcggggctggaagaagacggagctgaaggctgccccacaaattaaactctacctttacacttctaccacagactattaagactgatgatcagtataagtatatactggtggacaccaccggtcctccctcttgtgttttggaaacggactttacctgtgtttcaagctaccttaatgtcactgctcttgaggtttctgcgctttgaaagggatttctgtgtttttaaagagaatagtttgtagtatcgcatagaagcagtccttgagctgtcctatagaagggtaatttgatacggaccttgtggctatatttttataatggtaatttttaacgtctgagctggtggtttgcctcaacaacataaacttcctaatgatcagcgctagatgattgaatataaaatgctttattaatcaaacaagtgcacttgaacattttaaatctttatggtgagtaaattaaaagaagtttattaataatgtttttaaaaattatgcctgcagaatatttactttattatttgattaaatgtattatttatatttttctttctgcttttgtaacgatggttcaggtgtcttctggctcacttccaggaggtttctttgagcatttttgtaaatgtttgtcagggaagagtctgggccaaatattggaaaagcacattagctgaagagtgcaatgtattgtccaggctgccgattccttaaacttgggagagtgttgtccagtgacaggagtttgaggataatgtcaaagtcgacatttagttgggcttctgtagtccatacaaattatggccattgaataatctagagaattaatacttgaaaactaattgcaatattttcactaactattcattctggcaagtggccttgctttctttttgaaccctgcttgtaatggcctggggtttctaggtctcgatgctctgtgtttctgctttgtcaagtaggtgccatattcattgtatccttcttgcactgctcctgtgctcccgtgttgtaagccagcttgctgtatgcatctcagatgtcggttggtacgtccaccctctgctgttcttcaggaaatccgtggcctcacagattggaaatgagccctgagtgtaaacagccgctccagagcatagctccttaataaagagatgtacctc

SEQ ID NO: 95 - DNA, 3473 bp, Mus musculus
ctgcagatagtctcgggtggctcatgactgtcacccgggcaatccgaagatgaggcagaggattgccacaagttcgcggtcagcttaaatgacaggctgaggagactgtctaaataacaaacaaacaaataaatagccatgatgccatacgcctgcaatcccagcatttgggaggtggaggcaggaggatcataaattcaaggtcagttcagctacataagacctcgggtcatgaatccaaaagccaaacaaataaaatagatgactacaaggaaagctcaagagatccacggaaaagcgccgggtggcagtgtttccacaggtgtgggaacggcagagggcgcccctagccccgcgggggtaacaccgccccctcccccgcgccctggccggactttccatgctatttttacccgccgacaccggacacccgactggggtggctgcggcgtcggggccacacgtccgttcaccggtcgcccgggctgtgcgcgccatggagccacggtgcccgccgccctgcgctgctgcgagcggctggtgctcaacgtggccgggttgcgcttcgagacccgcgcgcgcacgctcggccgcttcccggacacgctgctgggggacccggtgcgccgcagccgcttctacgacggcgcgcgcgccgagtatttcttcgaccgacaccggcccagcttcgatgcggtgctctactactaccagtcgggcggccggctgagacggccggcgcacgtgcccctcgacgtcttcctggaggaggtgtccttctacgggctggggcggcggctggcgcggctgcgggaggacgagggctgcgcggtcgccgagcggccgctgcccccgccctttgcgcgtcagctctggctgctcttcgaatttcctgagagctcgcaggctgcgcgcgtgctcgccgtggtctccgtactcgtcatcctggtctccatcgtggtcttttgcctcgagacactgccagacttccgcgacgaccgcgatgacccggggctcgcgccggtagcggctgctactggctcgttcctcgctcggctcaatggctccagtcccatgccaggagcccctccccgacagcccttcaacgatccattctttgtggtggagaccctgtgtatctgctggttctcctttgagctgctggtgcatctggtggcctgccctagcaaagctgtgttcttcaagaatgtgatgaacctaattgacttcgtggccatcctgccttacttcgtggccctgggcacggagttagcccggcagcggggtgtgggccagccggctatgtccctggccatcctaagggtcatccgattggtgcgtgtcttccgcatcttcaagctctccaggcattcgaagggtctacagatcttgggtcagacactgcgggcttccatgcgtgagctaggtctcctcatcttcttcctcttcattggcgtggtcctcttttccagcgcagtctactttgctgaagtggaccgggtggacacccatttcaccagcatcccggagtccttttggtgggcagtggtcaccatgaccacggttggctatggggacatggcacccgtcaccgtgggtggcaagatcgtgggctctctgtgtgccattgcaggtgtgctcaccatctctctgcctgtgcctgtcattgtctctaactttagctacttttaccaccgggagacagagggcgaagaggcagggatgtacagccatgtggacacacagccctgcggtaccctggagggcaaggctaatggggggctggtggactctgaggtgcctgaactcctcccaccactctggccccctgcagggaaacacatggtgactgaggtgtgagggtcaactggggtctccagggagcagtggggtgggagggaggagggaaggcaggtcaggtgctgggttaaggactaagatggtaacaaaatcttaatctgaaggcatgtcacatggtggcgggtacagattcctagggggaccttatgtgacaggaattgccaggatttgggttgtgtccagggctccccccattgattgcgcaatgtggtagagctgtgcaaatgtccaggggctctatgggtagcactgtaagagacttggccatagattgtgagtttcctaggtgttcgtggggtcccactgggggcaagtgtggtcccgttaacacttgataggtactaatagaactttgggtcctctagggccaagtcggctcctgtaggtctctggagcactgttaaagagtgtgagcttgtggctacatggtcacacacagaggttatgtggtgatacatagcagattgtgtggattcatgtttcttctaggactcaagttattttagattctgtgagctctggagtcatgcagacaggatgtgatcactctgggtcctgatggaaaaagggttagggtataaaagatagacagaggcagagactcagataaagggacagagacacccccacacacacacacaacacacaattctctgtgttgtgcagggttataggactggaatcattttagggccatgcaaagctgagatggtgacccccatgtgtctccgaacagttgagtctgatgacttctacggtctcatgggacttgtgttactgtgagtcctgtggaacttttggttgaatttgactgtatgtgagggccattttaaacagtagatcagggtcacagcacagataaaactaactacaagggagcaagcatgggcacgtggatgtgtgtggcccgttgaacaagtttactcagggttatgcattgtagagctggtagtgtctgtatctctgggtccccctgcccgaagcacctagaaagacgatgggaactagtaacctgcctgtcttgctcatgtgggacccatatttctatgttgtcccatgctgtagtacaaagattcagaggctggttggagccacaaggaaagaaaacacagtagggcaagagtaggtacttgggaaaagatgtggcaggggacagagatctagaagaaagaaagatggagagaaggagcaggaggagcaggggagggggaaagagggaagggaaggagggagagacagagcaggtaaagaggaagagatgtgggggggggggggagaaggacctggagcccaagggtcatcctctctattctctgagtcataacagactctaagctatggcgtcagcatcccttagagccaaggaaggtcaccacactcctggaggtgctctgtgtttcctaggacagaaacccaaggctgtagtgtgctgtgcttcctcaagttacccagcggtcatagaccaagctggtgccaggtggcctgcctgtgacacccccacaacttctggtgtgcaggtattgcctgaggccactggtcctgtgtcctttgtttatcccttaaaacagggtccctctttgtagtgttggctgtcctggaactcactacgtaga

SEQ ID NO: 96 - DNA, 2561 bp, Mus musculus
tttttccttttttctggatgggcctggtacacactagtactctacccgggagctaactacatatccagtcttcgctttattttaatatttgagacatggtttcattaagtagaccaggctagcctcaaactcccagtgcctcctgagtgatgggattaaaggtgtgtgccaccactcacagccctctttcttattttaaagtaggattttactaggttgccaggctgctcctcctgcttcagcatccccagtaggctggaattacaggcgtgtaccatcgggtacagctttatcttactcaggtatggtcaaattgcctctaacattagcccgaataatcaccaaatcacactatgttcttggatgaatatcattaactgcaggcttagcctttggctgtacagccaatagcagtaattttactgacccctcgttcacgtggagatgatgaaggaaatatttggggttctcggacttggcaattaccagatgaatagatgggttcctcactgaggagtgctgatagctaacttaaaatattaacccccaaaataatgctctttatgatttacttttgttaataccactttgcaaatcaaactgtatctatttggttggttggttggatcttttcttttcttttctcttcttttcttttctttccttttcttttcttttcttttctcttctttctttttcttttttcctttttcttttcttttcttttttttttttagacagggtctcactatgtagctctggctgccctagaactcatttaggtagaccaagctggtctcagactcagtaagatctgtctctgcctcccgagtgctgaaattaaaggcttatgtcatcctgccttgcaacgtgtattttcctgctaccatttccttgagttatctgccaagtttggaagaaaggggaagaactgtagtaaatgatggatattttcctttaatatatcagtttatcttcatagtatatttgtttggggaaggaaatgcctatcatccatgccttctgtacaactagagaatttggagggatggagaggcatctggaactgtatcttggttattaccaatcccagcctttcctattacatgtgtgttgtagctgtcatggtcatgtctaaagcccagtccccttgtctgtgggttaacacatctgtaggtgcagctagacccaagatgaagatatttgaaaaaaaaattgcatagcaaacatgtaccaaatattttctccccccccccagcaatacagcacaacagtttgcatagcaattgcattgtattagatattataataccctagaaacaatataacttatagaagaagatgtgagcagggtgtatgtaaatagtacatgccactttgtagatgggacgtgagtgtcacagacactgtatcccagcaggggatggggcatgtcctggttccagtctcccaaggacactgagggatggctacatcttattccaactgtgaaaagtggttcaaataaaacattcttgagataaccttcctcatcaccccttacaaaaagttctgtttggggtattcaacagtgatgctcaggaacagaggaacagactataaacactgtaaataagtaagacaccattagcacaaagatacagagagaaagaggagttccatcaattgcagggaaaacctaaagacacctgctcttttgcctccatgactgtgcaggctggaaaacaaaactctgagcaaatattttggggatcatttggccacgacttgctagggcagccatcacatcttatcagggcagtatagacacacctctgcaatttatgcctacagtatatgggtaattttgagagagaaaagggtgcttcattgggggctacaaataattgaatagactgatgtaattcatttatgtgcactaatagctgtgcctcaatagagaatgtagaggtgtgtgaaaagaaggacctagggctgtgaatgaaataaaagtcaactcgttgtaacattttaggatttaaaacatgcggagagagacagaaaatagagggacctcagttggagctggtaaggtaggatgtaaagcccacgaggttgctttccagaggcaaagcacagcccgattacagcccctgggtaaattgcaatcacttatgttctgtgttgttaatctgaagactcagaaaatatacacagctgggcttaccacgtcttggtgcactgaggttgataggatatggtccatgaaagctagtgaatttttgagccccagaatagcctgcactgccattaaggacaaaaatgcaagaagatgcaatacgttctgtacccttcaaagtctttaatccatttccaagttgctgctcctgggaagcagagtccgctttgcaactgcaaactttacatgcttgtactgtggttcctgcttacccctattcagttacagccacaaggtaggacccaaacatgtacttgtgtttatttttctcaaagaaaatgtcttgtgatttttgttaatgcctgagttccgtgattaaataaatgtaccagctcagcttacc

SEQ ID NO: 97 - DNA, 3637 bp, Mus musculus
ggtgatgggtgggctccctcctccctaggaaaagtgggagaagacagccactcgcactaaaattgcctttcagccagtgttttggacattatagaagacaagaaagactcagcctgtggccagggctagcctgtgtgttagacatccagcacagacagctcgctgtgggaatgccacatttcatgctgagagccaagctggggaaattgcttctgtccttccccctctggagggatgaatccttgattacatctgattgtagtagctttgaacacttttgctgcttaggcaccacaggactggctgctctgttatcaacagttctgtttaatggcgttttcgttgcagacgccacgttcattgcaaatgccacgaaagtgctcgtggccagattagccttgtcacctggcctgactcattttgtgctcttgtggcgctgctgctgctgcttctgctccccccccccccccgagtccccccaggtagggtcttgctttggagcctgggctggccttggactcaatcctccggcctcagcctcctgcaactgtgtgtgtgtgcatgcatgcagaagtgtaaagaaaggcaggaccatgacggagacttgtggcgagcgcttgcgctctggcatcttaacccgcaatgagtagatcttaaccagctgttgagggctgctcccttggccggttgctgactgcctggcaatgtgcagaagctaacggagctgtgcagcattcactgtaatgctgtgtgttagcatgggatctttgatgttggtagtgtttaacattgttgtcaaggtgacccttcagtctcccttcccccttcttgtgttctaaacacgggggttcagtattctgctcctttttagaatgagatgggcatttttctgttcctgtgttcccgttccccagtgttagccatcgggggttttggcagctgctcagtgtcagggtcctaaaaggatgcatgctgcccggatgccctaagccctaacttgtgcttgtaggaggaatctttggtcgaattgtctactcttctggtgtggacagtttcgagggtttatttactcaagattgaggtagcgatgttttcttatgcctacagtaggcgacctgagccttgggggaggaagacatctcctgggtttgagaagtgaatcttacagcctattcctgtctggaggatcacagtcccgaggtctccaagcgtggcagtactgggatcagcgaggctgtcgcaccagacatgcaaactgtgatctggctgcatggctggcacggcatccctgcaggaagaatggggcgttttccctgttactgtcctcatctagtgtagccaggacaagttttagcttgtccctgggactcttggctggggtctgacctgctgcgctgtggtattttcttctttctagagtattctagagtatttctagagtatttttgtacacgttgagggcagtacaaggggaggtgggtctttttttcacctttaaaaaaatcaaattgtaggccgggtgtggtggcgcacgcctttaatcccagcactcgggaggcagaggcaggcggatttctgagttcagggccagcctggtctgcaaggtgagttccaggatagccagagctatacagagaaaccctgtctcggaaaaaaaaaaatcaaactgtaaaccgaacagtaaaattatttttaatatctttaatttgtagggttttgtttttttgacattgcttagactgattttcttagaatcatgtgaacaacaattcagtctaagggcaatctctgccagtctgatgtccagcaaggtcatggtgccatcaggggccactggagtagtttgcactgcttggggtttctcagttggtttttcaggggagagctggctttaaaaatatctcaggttctgagtatttaaagctcttgattttcctcctaagatagcacaccctcccctcccctcccttcccctcttccttccccctcccctgtgcattcgtccccttctctcctcctccctgctctctctcgctccttccccctcccttcctctcctctcctcctttggctgtctacccatgtctgtctctgtcgtgctccccacttcaccattagtacacctgctgctgatttggtcagatcccagactaaattataggttgctttgaacacatcagccctctcatttattgcaatgagggagaagtgaaaagctctcgtgccatctacctaatttagctttgggtgaactaaatggctttcccctcccttcggcaagtgctaaacactacagttccactttatccaaatgctcacttgctgccaaaaccctacttgggggctcttgactaaaatgctcaagagactacatttggccagctgcagagctccttggtggttttcttcagctgcttagggagccgatccattctttccctcctgaggaccttcttttgtttgttagtttgggacagggtctcagtgtgtagctctggctggtctggaagttactatgttgagtgggttggcctcaaacttatagagatctgcttgcctctgcccccacagtgtgttgggataagaggagcataccacccggcctggcatgatttcctttcattgggtggatttttttctctctcctttatttccttgttatttatttatttgtggttttggccttaatatttgtgagctaggttcttgagttcagctaacattttagaccacggattggttaagcaaagggaaggaagaggagggggcccttttctaataagggaaccattttcagctttgcaggccattctggttgccgcttctgtaggaatagacacactgttccattgggatttgattcatcagcacagggtgtggcttgctgcctcaggctgggatggcaagattctctgcttagagccagtggagcagccttccagtttggatagttagtgtgaggtctaagccagcgtgctgtgtccccttagctgccctgtctaccatgtgtatctgtttctgcacggccagcgctaagctgagattgcttcactgtgtggatttaagctacgagttgttgccccttttcgttactctgctggacccaggactgaaggccggctcatcccaggggctggagtgtggccggctgatgggtttctctgccttgccccagatcacatgcctttcctgggggtgtatattccatgactgttccctgtgaagggtcgagagcctggtctctccaacactactttggggacagctccagagctccctttggggctcctaagaccttcctgtgcttgccctgcaacaactggtcttcccctcccaggtgtccatcccagcagtgtccctcagaaggccttcctgcatgacacttttgtctccagtctgctcctccaaaagtgcccctgtattctcctgttagcacaggctagagctccaatgtaggcccatttcctcactgtttcgtgtcgtgggatgactgtgcctgtgtggtatcaggcacaataaatacaaagtaggtttactatttattcggaatgtgaatttgctatttattctacgtgttgattgtctatgttgtgataatgaacttaaagccaaataaaagcttgagttgtatctcctg

SEQ ID NO: 98 - DNA, 2615 bp, Mus musculus
cggacgcgtgggtcctgcggctcgggttgccggcgtgactttgagctcttcccgctctgctgccggcgctgagcacaaccgatcacctcagagcaggagccttggaagtggctgtcccaggcttgccatgcggctgctgcgggtcgccgcagccctggggcgtggaccgttccctcgggtccctgcagtcctgggctggcaggggaagcaggctgattggaagacccgccgatggtgttcgtcagggccagttcccaatgaaaaaatacgaaacattgggatctcagctcacattgattctgggaagacgacgctaacagaacgggtgctatactacactggcaggattgccacgatgcacgaggtgaaaggtaaagatggagttggcgctgtcatggattccatggagctggagaggcagcgagggatcacgatccagtcagcagctacgtataccatgtggaaagacatcaatatcaacatcatagacacgccaggccacgtggactttaccatagaagtggaaagagccctgcgggtcctggacggtgcagtccttgttctctgtgcggttggcggagtccagtgccagaccatgacagtcagtcgtcagatgaagcgctacaacgttccctttttaaccttcattaacaaactggaccgaatgggctctaacccatccagggccctccaacaaatgagatctaaactaaatcacaatgctgcatttgtacaaatacccattggtttagagggtgattttaagggaattatagacctcattgaagaacgagctatttactttgatggagactttggtcagattgtccgatatgacgagattccggctggattgcgggccgcagccgctgaccaccggcaggagctcattgagtgcgttgctaactcagatgagcagcttggtgagctcttcctggaagaaaagatcccctcagtttccgacttaaagcgagcaatccggagagctactctgagtcgatccttcactcctgtatttttgggaagtgctttgaaaaacaaaggagttcaacctcttttggacgctgttttagaatacctgcccaatccatctgaggtccagaattacgctatactcaatcagaatgactcaaaagagaagaccaaaatcttaatgaacccccaaagagatgattcgcacccatttgtaggcctggcttttaaactggaggcgggccgttttggacagctgacttatgtccgaaattatcaaggtgaactgaagaagggaagcaccatctacaacacgaggaccgggaagaaagtgcgcgtgcagcggctagtgcgcatgcacgccgacatgatggaggatgttgaagaagtatatgctggagacatctgtgcattgtttggcattgactgtgcaagtggagatacattcacaaacaaagataacagtgacctttctatggaatcgattcatgttcctgagcctgtcatttcaatagcaatgaggccttctaacaagaatgatctggagaaattttccaaaggtattggcaggtttacacgggaagaccccacatttaaagtccactttgaccctgagagcaaggagaccattgtgtcagggatgggagagctgcacctggaaatctatgctcagagaatggagagagaatatggctgctcttgtatcacaggaaaacccaaagtagcctttagagagaccattgttgccccagtgccgtttgattttacacataaaaagcagtcgggtggtgccggccagtttggaaaagtaataggagtgctggagcccttgcccccagaggactacacgaagttggagttttctgatgagacatttgggtccaatgttccaaagcagtttgtccccgctgttgaaaaggggtttctggatgcctgcgaaaaaggccctctttctggtcacaagctttctgggctacggtttgttcttcaagatggagcacaccacatggttgattcgaatgaaatctctttcatccgagctggagaaggtgctcttaaacaagccttggcaaatggcacactatgtattattgagcctattatgtctgtggaagttatagcccccaatgaattccagggaacagtgttcgcagggattaaccggcggcatggagtgattacagggcaggacggcattgaggactacttcacactgtatgcagatgttcccctaaataatatgtttggttattccactgagcttaggtcttgcacagagggaaaaggagagtacacgatggagtactgcaggtaccagccgtgttcaccatccacacaggaagagctcatcaataagtatttggaagctacaggtcagcttcccgtaaaaaaagggaaagccaagaactgactctcctcactcaggatatactgactatttgactaccacacttggggatgatggagtctgcttgaatgaattctgacggcagaaacaaatttaggagcccctgctggcccacgttcaggaacttctgtatgtacgccaaggataactgtgtatttaaactgtattgactatttttattgtttagtaaaagaccttaaataaaattatattattactgaaaaaaaaaaaaaaa

SEQ ID NO: 99 - DNA, 2418 bp, Mus musculus
gacgcgatggccgggtccgcgtgggtgtccaaggtctctcggctgctgggtgcattccacaacacaaaacaggtgacaagaggttttgctggtggtgttcagacagtaactttaattcctggagatggaattggcccagaaatttcagcctcagtcatgaagatttttgatgctgccaaagcacctattcagtgggaggagcgcaatgtcacagcaattcaaggaccaggaggaaagtggatgatccctccagaagccaaggagtccatggataagaacaagatgggcttgaaaggcccactaaagaccccaatagccgctggccatccatctatgaatctgttgcttcgtaagacatttgacctttatgccaatgtccggccatgtgtctcaattgaaggttataaaaccccttacacggatgtaaatatcgtcaccatccgagagaacacggaaggagaatacagtggaattgagcatgtgatcgttgatggggttgtgcagagcatcaagctcatcaccgaagaagcaagcaagcgcattgcagagtttgccttcgagtacgctcggaacaaccaccggagcaacgtcacagctgtgcacaaagctaacatcatgaggatgtcagatgggctctttctgcaaaaatgcagggaagttgcggagaactgtaaagacattaaatttaacgagatgtaccttgatactgtatgtttaaatatggtacaagacccatcccagtttgatgttcttgtcatgccaaatttatacggagacatccttagtgatctgtgtgcaggactgattggaggtcttggggtgactccaagtggcaatattggagccaacggtgttgccatctttgaatcggttcatggaacagccccggacattgcaggcaaggacatggccaaccccacggccctcctgcttagtgctgtgatgatgcttcgccacatgggactttttgaccatgcagcaaaaatcgaggctgcatgttttgctacaattaaggatggaaagagcttaacaaaagatctgggaggcaacgcgaagtgctctgacttcacagaagaaatctgtcgtagagtcaaagacttagattagcactcctgctggtggatttgctgcagtcagtcaatcactccaaaaggataccctgtaatcctccttgagggcgcccaccattggtttgcttgcttcttgacagagtacgttttttgaatctggccttttcttaacaaaacccttgcaatggatgcacatgatggccccaggccttcattcaaagggttttcccaagtgctggttgtatttattgtccgtctggtaaaccttattttgtaaactgtaagtgaactgtatcatttatcattgttaacccattttacacttcaggcaaaatcattttcctcaactgtaaatattctgatacagaattaataagagaagatatttaactttttaacaaaagccctggatttttggtttatgaaaaacaaactgggaataaaacagggttttaacaatcgcacaagataacattattctaatactaatgggtacaaaagaaatttactgggaaagttcacagcaaaaaaatggtatatttcttaaaaatatggaaataaagtatttgtcctatacatgaattactattaataaaaatgtaagctccaagaaatccataatgaatgatgtaattttgttactacatcggtaatccttgtcaaggccccggatgctctctgtgtatttgattcttttgttaccttgagattcactattttgggggaagagctttcagataagggagatcactcctcactagacagatcgtcagcattgcgagctgtcagccatgagagccagccactgcagatcccctcccacgtggccacactccagccagtgctgcaggtgaccctggaaaggcctggctgccccttgactttccctaaagcaaccagtcactgccttctgccccagtagcacccattacagacttaattgccgaggtggagctgactcagcccacgctcatacaaatcaggccaagcgggggcctgtgttaccagctgctgaccatcaggttctgcccctcattcttcccacagcctctgctccacagcatgaacctagcctttggcccacaccaaagccaagctgtcttcccttagcccttgcactagtttgcaaactcgtggctttgcataatgtaccctggtcccaaggggatttcttaacaacagatgtccctgtctgggtcatttttttaaagcttttatttggacttacaatcttctgtgtattttactttaaaactgctgctttccctgtctcactggattgttctggttagcagtggctttgggttcacagtaataaagaacttaagaactgaaaaaaaaaaaaaaa

SEQ ID NO: 100 - DNA, 464 bp, Mus musculus
gagctaagggattggggtggtgggatcatggtggagggcggtggtgaatactagcgatgtcccccgctacccgtgcgtctgcctccagggtgcccctccaaccaggatgaggctcttcatcgctcttcctgtcctgattgtggtcgtagccatgaccttggaaggcccagcccccgcccaggcggccccggatttgtccggaacattggagagcataccggataaactgaaggagtttgggaacactttggaagacaaggcccgggcagccattgaacatatcaaacagaaggaaattttgaccaagacccgggcctggttctcagaggcatttggcaaagtgaaggagaagttgaagaccacgttctcctgagcacctggcgggccacctcgaagcatcaaggacatccacgtaatgtgccaggtccctcttcatcacagaccaataaaaaacgtgtagaagg

SEQ ID NO: 101 - DNA, 1780 bp, Mus musculus
ggacaccacccacccagagtggagaagcccagccagtcgctgtcaggaaccctgagacgctgctccagctatgtgtgaagaggaagacagcacagccctggtgtgcgacaatggctctgggctctgtaaggccggcttcgctggtgatgatgctcccagggctgttttcccatccatcgtgggacgtcccagacatcagggagtaatggttggaatgggccaaaaagacagctatgtgggggatgaagcccagagcaagagagggatcctgacgctgaagtatccgatagaacacggcatcatcaccaactgggacgacatggaaaagatctggcaccactctttctataacgagcttcgtgtggcccctgaagagcatccgacactgctgacagaggcaccactgaaccctaaggccaaccgggagaaaatgacccagattatgtttgagaccttcaatgtccccgccatgtatgtggctattcaggctgtgctgtccctctatgcctctggacgtacaactggtattgtgctggactctggagatggtgtgactcacaacgtgcctatctatgagggctatgccctgcctcatgccatcatgcgtctggacttggctggccgagatctcaccgactacctcatgaagatcctgactgagcgtggctattccttcgtgactactgccgagcgtgagattgtccgtgacatcaaggagaagctgtgctatgtagctctggactttgaaaatgagatggccacggccgcctcctcttcctccctggagaagagctacgaactgcctgacgggcaggtgatcaccattggaaacgaacgcttccgctgcccagagactctcttccagccatctttcattgggatggagtcagcgggcatccacgaaaccacctataacagcatcatgaagtgtgatattgacatcaggaaggatctctatgctaacaacgtcctgtcagggggtaccaccatgtacccaggcattgctgacaggatgcagaaggagatcacagccctcgcacccagcaccatgaagatcaagatcattgcccctccagaacgcaagtactctgtctggatcggtggctccatcctggcttcgctgtctaccttccagcagatgtggatcagcaaacaggaatacgacgaagctgggccctccatcgtccaccgcaaatgcttctaagtcccccctgctctgcctctagcacacaactgtgaacgttttgtggatcagcgcctccagttcctttccaaatcattcctgcccaaagctttgatttgttactcgtggtttttttaaaaataaatcagacatgtgctacccttaacttgtagccctggcctagcaacactgattcaattgtgtttctgttaggtgagaatcatttattatagggtggccccctctagtggtcaggaatagatgtgacacaactagaaaagtatattcccaggcatggatggcatcaatcacttcaacagaggaaggtccacttaaatgatgtaaacggggtatttgagagcgtataggacttgtatagattacatataataatatatattagtaccaataggaaaaatcgacactgacttcacagctagagtgactattttactttatacatacaggtgaccagataggtaaaaaacaattttacgtgtatttaaaatttggcaagtaatatggttttattaaaatcacatcttttgtattaaagcatacacacgtgcatggatatgcatgcgtgacttttaactt

SEQ ID NO: 102 - DNA, 3349 bp, Mus musculus
gctgccttggcgcaacctccgtacagtctgtggattcctcggtgacaacagtggcggtcatggagacggatgtcaccagtgacaccgtggaagtgctaccccagcacaagttcgacctcaggtccctggaggcctacctgaatcagcacttgccgggctttgggtcagattcccgggctgtgctgactgttactcaatacagatcaggacagtcaaacccaaccttctttctccagaaaggatctcaagcctatgttctcaggaagaaaccacccggctctcttcttcccaaagcacataagattgacagagaattcaagatccagaaagccttgttttccattggatttcctgttgccaagcccctgctatactgcagagatgcttcagttatcggaacggaattttatgtaatggaacatgtgcagggtcggatctttcgtgatttttccattcctggagttagctcagcagaacgtgctgctatatatgtgtctgtggcagaaaccctggcatggctacattctctggatatacgctcgctgaagctggacaaatacggtactggagtcgggtactgcaaaaggcaggtgtccacctggacgaagcagtaccaggcctcagcccatcagagcatccctgccatggaccagctctccacgtggctgatgaagaacttgccagatagtgacagtgaggagtgcctggtccacggagacttcaagctggacaacatagttttccaccccaaagagtgtcgggttatagcagtgttggactgggagctctcgaccttcggccatcccttgacggacttagcccatctttccttgttttactattggcccaggacactgcccatgataaaccgaggctctcacattccagagaacacaggaataccgttgatggaagaactgatttcaatatactgccaccgaaggggaattgatcctaatctccctaactggaatttctttatggccctctcattttttaaattggctggaatatcacagggagtctatcgtagatacctcatgggaaataactcatctgaggatagcttcttaactgccaatactgtgcaacctctggcagaaactggattgcagctgtcaaaaagaactctcaggactacaccaccacaggctgatgctaaaagccagctgtttgcacagagcaggagaggccaggaagttctcactagagtgaagcagttcatgaagcagcatgtctttcctgctgagaaggaagtagctgaatactatgctcaaagtggaaactcagcggaaaagtggggacaccccttagtgatcgaaaaactaaaggaaatagccaaagcagagggcctgtggaatttgttcttgccagctgtgagcggtctcagccaggtggactatgccttgattgctgaagagacaggaaaatgcttttttgctccagatgtttttaactgccaagcaccagacacaggcaacatggaggtactgcacctgtatggcagcgagcagcagaagaagcagtggctggagcctctcctgcgtggcgatatcacctccgtcttctgtatgacagagcccaacgtctcatcaagcgatgccacgaacatcgaatgcaccatccagagagatggaggtggctatatagttaacggcaagaagtggtggagcagcggagctgggaatcccaagtgcaaaatcgccattgttttgggaagaacggagtctccctctgcatccagacacagacagcacagcatgatcctcgtgccgatggacacacctggagtggagttaataaggcctttgtcggtgttcggctacatggataatatgcatggcgggcactgggaggtccatttcaatcacgtgcgcgttcctgccagcaacttaatactaggtgaaggcaggggctttgaaatttcccaaggccgccttggacctggaagaatccaccactgtatgagaaccgtgggtttggcagaacgcattctgcagatcatgtgtgaccgggccgtgcagagggaggccttcaagaagaagctctacgaacatgaagtcgtggctcactggattgctaagagccgtatagccatcgaggagatccgcttgctgaccttgaaagcggctcacagcatagatactctgggcagtgcctcagccaggaaggagattgcaatgatcaaagtggctgcccccaaagctgtctgcaaaatagctgactgggccatccaggtgcacggaggcgcgggagtttcccaggattaccctctggctaacatgtacgccatcatacgcaccctgcgcttggcagacggccctgacgaagtccacctctcagcgatcgccaagatggagcttcaggaccaagccagacggttgacagccaggatgtgatggagcaacccggggcacactcttgaccagctcaaaacttacatctcacatctcttgagtagtttgagcacaaggctaattattcacccatggtaaagattttagcatctatttcgatcactgggttttataatgttaagtaaggatcacacagacgtgaggtaaataggaaaccccataactgccattgagtctggtgtctaatgggttagcattcactttatacacatgacctgtgatgaggtcacactgagaatggtagagctatttctggaattcagccaagtgaatagacaccccaggcctaaataaccttgttctgaaatacttgcagctgtaccccttttagcagtgttttggagcttaatttagcacctcagagaaagcaatagcttgaagatttcggagttcccaataagcctctttctaacccaacaggaagtagttctggtgaaatctcatgcaggtgaaagctcacaaggaagtgtagcctgttaggagaacaggcgatcaaggccacttaggttacatagaaaaagctgaggagatccgtaactaatcggtgctatgtcagagctccacagctccctgggagctggtctgatcaggcgagacatgttctgacagctctgcagtgccactgtgggtcaccacagccctctgcatcgaaatgtcaccggcacagcagaggacagccgttagctacagttggaaaggtttgagttggtggtctgctttatcaagtaaggatgttttgaaatctcgtcacaaagagaaatattttaaatcaaaatttggcatccaaataaacacagtaagtgtttacatactggattttgaaaacttaactgaaaataatataaaatatctactagataatacctttacatattgagcctacatcgaattatattttggaaatactgtattgaataaaatataccccagtc

SEQ ID NO: 103 - DNA, 1295 bp, Mus musculus
cgcgggccgggccgggccgaagcgagcgccgggcgggcagcggcgccagagcgagtggagccttcggggtccccgggtggcggcggcggcggcggtgcagaggaggaaggcggcggctctccccctgccggcgcgcgacccggtccgtctcgcgagctcgcgccggtcccgcggcccggcccggccccgggcccctccgtcgccgccgccgccaccgccatggcccggccgctggtgccaagctcgcagaaggcgctgctgctggaactgaaggggctgcaggaggagccggtggagggcttccgggtgacgctggtggacgagggtgacctgtacaactgggaggtggccatcttcgggccccccaacacctactatgagggcggctacttcaaggctcgcctcaagttccccatcgactacccgtattccccaccagccttccggttcctcaccaagatgtggcacccaaacatctatgagacaggggacgtgtgcatctccattctccatcccccagttgacgacccacagagtggggagctgccctcagagcggtggaaccccacacagaatgtcagaaccatcctcctgagtgtaatttcgctgctgaatgagcccaacaccttctcgcctgccaacgtggacgcctcggtgatgtacagaaaatggaaggagagcaaggggaaggaccgcgagtacacggacatcatccggaagcaggtcctggggaccaaggtggacgcggagcgcgatggtgtgaaggtgcccactacgctggccgagtactgcgtgaagaccaaggcgccggcgcccgacgagggctcggacctcttctacgacgactactatgaggacggcgaagtggaggaggccgacagctgctttggggatgaagaggatgactctggcaccgaagagtcctgacccacgtccctgaaataaacttacaaattttacctcagcaggacccgtgtgggcctcaggcgacagactacctcaccgaggttccatgtgggctcccatcccatgatccttaggtcctcttaccccgtattccccatgggttttcctcggctttggagaagagctgtggtgcagggcaaacaccccactcagctttcagatgatgacaagcctgggaggctggggaccgactgcctggtggggagccagagactccagcccagcccaaggaaggccagcaccacagtctcctctctgcttttggtgtgtgtgaaataaaataaaatagctttctgagaaaaaaaaaaaaaaaaaaaaaaaaaaaaaaa

SEQ ID NO: 104 - DNA, 1984 bp, Mus musculus
ccacgcgtccgcccacgcgtccgccgacattagtcattcatcccgctcatgctttggagcgtttattaagggcttcactcctgcctcacactatctctcccgggctcaaactcggatcactgtagagtctcgcttcttcccctgcggctgcgaagcaaatttcgcctctccagcaatgcacctccctgcgatcctgctttgtgctctctggtctgcagtagtggctgagacctcggatgactacgagctcatgtatgtgaatttggacaacgaaatagacaatggacttcatcccaccgaggaccccacgccatgcgactgccgccaggagcactcggagtgggacaagctgttcatcatgctggagaactcgcagatgcgggagggcatgctgttgcaggccaccgacgacgtcctccgtggagagctgcagaggctgcgggcagagctggggcggctggcgggcggcatggcgaggccgtgcgcagccggtggccccgcagacgccaggctggtgcgggcgctggagccgctgctgcaggagagccgtgacgcgagccgcaggctggcgcgcctggaggacgcggaggcgcggcgatccgaggcgacagtgtctggcctaggcgctgtgctggaggaactgcggcggacgcgcgccgacctgagcgcagtgcagagctgggtcgcccgccactggctgcccgcaggttgtgaaacagcaattctcttcccaatgcgttcgaagaagatttttggaagcgtgcatcctgtgagaccaatgaagcttgaatcttttagtacttgcatttgggtcaaagccacagatgtattaaacaaaaccatcctgttttcttatggcacaaagtggaacccctatgagattcagctgtacctcagttcccagtccctagtgttggtggtgggtggaaaggagaacaagctggctgcagacactgtggtgtccctggggaggtggtcccacctgtgtggcacctggagttcagagcaggggagcatgtccctgtgggcaaacggggagctggtggctaccactgtagagatggccaaaagtcactctgttcctgagggtggactcctacagattggccaagaaaagaatggttgctgtgtaggtgggggctttgacgaatcattagcattttctggaagaatcacaggcttcaatatctgggatcgggttctcagcgaggaggagatacgggccagtggaggagtcgaatcctgtcacatccggggaaatgtcgtcgggtggggagtcacagagattcaggcgcacggaggagcccagtatgtttcttaagtgttgtgaaaaatctacttgaagccaaaggagactcacattttaaatatgccagttggaaaagtctgaaaacttcggtgcgtaatagacgaatgaaggagagacttgagattgtctttgtttatcttggcaaaatactgaatacacagttgaagggaaggcttgagagagggctccgggatgttgttactaagccttatactgtggtgctttcagattaatgtctgcctctgtcagataaaccctcagataactaaacaggactggactctgaacagagggacgattgtgtgactttttttttttttattttggttaattttattttggccagagacatttttatattggaagaataacaaaacaagctctgttgcccattgttcattctttctggtgtgtattttgtgacaaaagagatgatgagaaaaccatatttataccacaaagtgacttattaacgaacataaatgtagcttacgtgttataatccaatgttccatttgggagaaggtagttgtgtaatttatattgtgaaatgtatttgtattaattttatttttgtaaaagtctactgtaaataaaatgttttataaagcttaaaaaaaaaaaaaaaaaaaaaaaaaaaaaaaaaaaaaaaaaaaaaaaaaaaaaaaaaaaaaa

SEQ ID NO: 105 - DNA, 521 bp, Mus musculus
ttgcggccgctttcagatttggagcgaaaacacctggatctcaaggaagtggcgctcaaacagtttcgttctgtgaaaaaaatgggtggagatgaattctgccgccgttatcaggaccagcttgaagctgaaatcgaagaaacctatgcaaattttataaagcacaatgatggcaaaaatatcttctatgctgctcgcacccctgccacactgtttgcagtcatgtttgctatgtatatcatctcaggactgactggcttcattggcctaaactctatagctgtcttatgcaacctcgtcatggggctagcactgacgtccctttgtacttgggcatatgttaagtactctggggagttcagagaaatcggaacaatgattgatcagattgctgaaacactgtgggaacaggtattgaagcccctgggttgataatttgatggaggaaaacataaggcagtctgtaacaaactctatcaaagcaggcctgactgaccagtgtctcatcaagccggccgcta

SEQ ID NO: 106 - DNA, 1703 bp, Mus musculus
ggctcgcactccggctctgctaccccaccgcgctcgcgtctcctctcgctccgctgcctaagggcccctcgccaccgccaccatggacgccatcaagaagaagatgcagatgctgaagctcgacaaagagaacgccttggatcgagctgagcaagcggaggctgataagaaggcggcggaagaccggagcaagcagctggaagatgagctggtgtcactgcaaaagaaactcaagggcactgaagatgaactggacaaatactccgaggctctcaaagatgcccaggagaaactggagctggcggagaaaaaggccacagatgctgaagctgacgtagcttctctgaacagacgcatccagctggttgaggaggagttggatcgtgctcaggagcgtctggccacagctctgcagaagctggaggaggccgagaaggctgcagatgagagtgagagaggcatgaaagtcattgaaagccgagcccaaaaagatgaagaaaagatggagattcaggagatccagctgaaagaggccaagcacattgctgaagatgctgaccggaagtatgaagaggtggcccgtaagctggtcatcatcgagagcgacctggaacgtgcagaggagcgggctgagctctcagaaggcaaatgtgccgagcttgaagaagaattgaaaacggtgacgaacaacttgaagtcactggaggctcaggctgagaagtactctcagaaggaagacaaatatgaagaggagatcaaggttctctctgacaagctgaaggaggctgaaactcgggctgagtttgcagagagatcagtaaccaaattggagaaaagcattgatgacttagaagagaaagtggcccatgccaaagaagaaaaccttagtatgcaccagatgctggatcagactttactggagctaaacaacatgtgaaaccctccttagctgcggccacattctctccccctccccccatgtttaattttgtctttaaacacatgcttaccgtgaaaccccttcaatgcgtttttttttatatatacttttaccactgtcactgaaacatctgccgagagccagctagggcaggagttggggaaagacgcgcagaaaggcaagcccgagtcagggcacttgttatttaaatgtgccatttcccaggttgccacccttcatagagtttaggcatgcagtttgcttagccagtgtaggaagcctcatgagaacagaaccattaacagccagagtgccaatggtgggatcagcaggaagactgatgttggagacaatcgggtgcggattggtgctaatttaaacaaaagggcctctggggtcttttgttcaatattttacaatttagacttctgtccaacactaatttattttgtcttgagttgtactgcgagagaagaatatggggttttgtatgcccgtgttccttaaagccaagggtttgaaagccacgctggtcttctgagattccaagtccttccccagctgacatgcccgtagccccttccgaatcagtggggcgagcgctcaacacggatcgccccccccttcccagttttccatatcagggtagaagatctaggcactacatatgtaattggtaaagaaaaggcattttcttaagagttataactatgtaaacattgtataatgatatggaataaaacgcacatttaggacattttct

SEQ ID NO: 107 - DNA, 580 bp, Mus musculus
gggctgttcagcggctcctggggaagccccagaaactcgagcttccgccgctcggatcatccaagtgtttgagcatggcagaaggggacaccttggtctcagtggattacgaaatttttggaaaggttcaaggggtgtttttccgcaagtacactcaggctgagggtaaaaagctaggtttggtgggctgggttcagaacaccgaccggggcaccgtgcaagggcaactgcagggccccgtctccaaggtgcgcttcatgcagcagtggctggagaccagaggaagtcccaagtcgcacattgacagagcaaacttcaacaatgagaaagtcatcgcaaacttggattattcagacttccaaattgtaaaataatgaaacgaatcttaatattttttcaaaataatctcactcctttttttaaatcgctagattaaaaaaaaaatagaactattctgtgctcagtattagaatttgttagtaagttattttggttgcatgttggaaaagttaccacgtattacaagtatgatgaaatacaaatgtgtataattctaaccaataaaaacacattagaacct

SEQ ID NO: 108 - DNA, 1234 bp, Mus musculus
tccttcgcctgcttgctgtgtgagactgagtaactgctagatccttggacttccattcacagcttcgactgaacaattgttgggaatttggctgccgactgtaccttggatacaaggccaaattccatgactaccatggctgacaaaatggacatgtcattggaagacatcattaagctgaccaagatccagcaaagacgtcatgacaggcctgattcccgggtgaatcgaggcactgggtctaagaggtataggccagctttcacccatggtggaaggaacaggctggcaccatactgcagaccaaaacaacttccagacaagtggcagcatgacctgttcattggaggcttcaggggtcaaaaccacgtggatactggtgggaagctcttcttgtcaaatctgcacttcggagtgtcagatgctgatattcagctactctttgctgaatttggaacgttgaagaaatctgctgtgcactatgatcgctgtggacgaagtttagggacagcacaggtgcactttgaaaggaaagcagatgccctgaaggctatgagagagtacaatggcgcccctttggatggccgccctatgaacatccagcttgccacctcacagattgatagacaaggaagacctgcacaaagcaaaaataggggcggcatgacaagaaaccctggctctggagtattaagtggtggaggcaccaagaaatggacacttggaggcagccagggaagagggagaggcaccatcaggaactcaaaactgcagcaacagcagcagcagcagaagcagaagcagcagcagcagcagcagaagcagcagcagaagcagcagcagaagcagcagcagcagctatctgcagaggagctggatgcccagctggatgcttatcaggaaatgatggacaccagctgaacaattgagcaaagctgcacaagaacggaacccatggcctggtctgtgatgcctagactgagggttggctactggaccatgaacacaatggtggattcctcctttgcttcttttgcttttctcctgttttaaaaccccatgtaaagttctttctttctctccttctttcttttatttacattcagaaatacacctgttttgtgctgagttattttgtggataaattatagtttttgcttttgtgaagttggcattttcacctttgccctaataaaattgtgtgtagaaataaacaagtattctggagtcataa

SEQ ID NO: 109 - DNA, 1739 bp, Mus musculus
cggacgcgtgggcggacgcgtgggcggacgcgtggggcgatagtgatgtctgcggccaagatctggaggccgagccgtggcctgcgccaggctgctcttctcctgttgggacgatctggggttcggggcttggctagatctcaccccagcaggcagcagcaacagcagttcccatccctggacgacaagccccagttcccaggggcctctgcagagtttgtagacaagcttgagttcatccagcccaatgtcatctccggcatccccatctaccgtgtcatggaccgccagggccagatcatcaaccccagtgaagatccccacctgccccaggaggaggtgctgaagttctaccggagcatgacgctgctcaacaccatggaccgcattctctatgagtcccagcggcagggccggatctccttctacatgaccaactatggcgaggaggggacacatgtgggcagtgccgctgccttggagcgcacagacctggtgtttggccagtaccgggaggcaggtgtgctcatgtaccgggactacccgctggagctgttcatgtcccagtgctacggcaatgtgaatgacccaggcaagggacgccagatgcctgttcactacggctgcaaggaacgccacttcgtcaccatttcctctccactggccacgcagatccctcaggcggtaggggcagcctatgctgccaagcgggccaatgccaaccggattgtgatctgttactttggcgagggggcagccagtgaaggggatgcccacgccggtttcaatttcgctgccaccctggagtgtcccatcatcttcttctgccggaacaatggctatgccatctccacaccaacctctgagcagtaccgtggggatggcatagcggctcggggccctgggtacggcatcatgtcaatccgtgtggacggcaacgatgtgtttgctgtgtacaatgccactaaggaggcccgacggcgggctgtggctgagaaccagcccttcctcattgaggccatgacctacaggattggccaccacagcaccagtgacgacagctcagcgtaccgttcggtggacgaggtcaattactgggacaagcaggaccacccaatctcgaggctgaggcagtacctgctgaaccagggttggtgggatgaggaacaggagaaggcctggcggaagcagtcacgaaagaaggtcatggaagcctttgagcaggctgagcggaagctaaagccgaacccaagcctcctcttctccgatgtgtaccaggagatgcccgcccagctccgcaggcagcaggagtcgctggcacggcacctgcagacttacggggagcactaccccctggaccactttgacaagtgaggccctagccagcacgagggggtcctgctctgagtggatgctgccccctgtgctggtcagctgtgcgaacatgctgagcagccagggtggcattccagggtgacttttgctcctgttcctgctcccccaggctacttcactggggcaccatgtttgcagccgttgctgcggctacttcactcccttcacctgttacagtgccttttaggggtgggaagggaccagggccagggaagaccctctgggcagggtggccctgggcttgcccagagagatagctgattggcagagtaagtaaaccacaggtctgcctttgaaaaaaaaaaaaaaaaaaaaaaaaaaaaaaaaaaaaaaaaaaaaaaaaa

SEQ ID NO: 110 - DNA, 4887 bp, Mus musculus
gaacttgggtgctctgctgcagcggaagcaccggcacccacctcctccagacctgcttgatcaacggcaaagggctggtagctgcggatgctgagccagcttgtaccgtttagagttaagaagccagaagcagggaagccatgggtcgggcacgcaagcctccacctgcgctgcacaggcactgtgagggatgcttcaaccgccactgccacgttccggtggagcccagcgtctcctgcctggtgataagctgccacctgctctgtggcgccaccttccacatgtgcaaagagtcagagcatacactcctctgccctctggagcaggttccctgcctcaactctgagtatggctgcccgctctccatggcacgccacaagctggctaagcacctgcaggtatgccccgccagcgtggtctgctgctccatggaatggatccgctggccaaacgtggactcagaaattccttcacgagaacatcatgaaagagacccccagtgaggagtgtttggacacagccctggccctccaggaccagaaggtactgttcagatccttgaaaatggtagagcttttcccagaaaccagagacgccacggaggaggaaccagacatgaatggtgacaccagttgggaggagactgggggcgcagtggggggagtggatgccaggctagcaccaaattcttgtttgccggcaaccagtaggcaaatgatggagctcagtcaggagggaacgagatgcactggcaaaaaccaaagaagggatggacctggacaagtttggcaagtgggaaagtatgttcagcaaggagcacgcagcctctgttttaacaggttccttggggaagagtgaagacaagaatggggatgtggctgggaaagagcagtgctccagtaatgttcgcataggggatgcagagggttctgccgaaaggagaggaccacaggaaagccagaagtcccaggaacttcccgctaccatggagatgacagggcttgctccctggcaagatggtgttctggaaagactaaaaacagccgtggatgccaaagactataacatgtatctggtgcacaacgggcggatgctcatccactttgggcagatgcctgcttgtacgcccaaggagagggactttgtttatggcaacctagaggctcaagaagtgaaaacggtttataccttcaagattcccgtgagctactgcgggaagcgagctcgcttgggagatgccatgttgaaatgcagaccaagtgaacacaaggctgtggacacttctgatctgggcatctctgtggaggacctgcccaaatctgatctcatcaagaccaccctccagtgtgctttggaaagagaactcaaaggccatgtcatctctgaatccaggagcatcgatggactctttatggaccttgccacccaaacatacaactttgagccagaacagttttcctcagagacagtgttggctgatctcctaggcactgcccaacccgggggcctgcacgtggagctccacagcgagtgtgtgactagaagacacaacaaaagcagctcagcttttacgttcacctgcaacaaattcttccgaagggatgaatttcccctgcacttcaagaatgtccacactgacatccagtcgagtctcgatggctggttccagcatcgatgccccctagcctacttgggatgtacatttgttcagaaccacttccgcccccctggacaaaaagcaaaagtgatctatagccaggagctgaagacctttgccatcaacaccagaggttgctccggagctgagtgagaaatggaagagcgaccatctctctggccgtgatgggaaaagcctgaattctctaaccagcctgcccctggaggtgttgcaatacattgctgggtttctggacagcatcagcctgtcccagctgtcccaggtgtcagtactgatgaggaacatctgtgccactttgttgcaagagagagggatggtcctctcgcaatggaagaagaagaggtattctcacggaggcacctcctggaaagtccacaatcagatctggcagttcagcagcctcttctcaaaaatcaacagctgggagtttaatgacgtcacctccatgtctgagcacctgaaaacctgtcctttcaacatcgtggagcggaagactgacccgattcgtttgaccagcatgtgccagccccaagagaaggcccgggagatcttagtgtccacctttagggcccgaccacggggcagacacttttgaagatatgcacaccactgctcctggcttctcagagtactcaaagtaggacagtgtgctttgaggaaccactctgaaacctgcacatctagaagacttgtggagtccttcaggccttagcaactacactagaacactaaggatatttgtttgtttgtttatttgttttgtttgagctatggcttatatgaaagcgccacctttttttgcctttatcttacttctttcctctcctaaaatagataagtctaggagaaaattaatagcttaaggccgtttgataaacgcacccaagttcttggttgactggagagcaagaaaagtctgtaaccagcatagactggtgcttctacattgagctgtccagtttacaaaccaccttcaagttcttgaggcaggtgacccagggacagggtctggggtttggtgactacccagggtatccaggtgaagggagttcaactggaaggttctgaagcttgcttggtctcgacaactcagggctttttagtcaccctactgcatcaaagcccagatggtttcaaggtgacccaagagaatggaccacacagcgtaagcacagcagtttcacagacacaagccaaagcaaaacagtgtgttgcatatagtcttggcaacaccaagagaaaaacaacaactctttacaatgagggaaagaccaaaaatctctggaagcaaagtagcagctcctggttgagagccactgtcctaaaggatgctaccccagccatggtaagttaggaggtgctcactgtttactgtgacaaatctgaccttacatggccagcataattcaacgcaactcttactcgtttactaaataagttttaaacatgggacgatgctaaattgagaaccagatggggctgatctacccaatatggctttgggtccttgggccacatgaagtaatacatcttccctgccctttttagggaaactggaaaccaggaaagtcattcatctcaggttaagttcctcctcccttaattggtgccattttccagcaaccctagatgttctcaagctaataataatcataatcataaagaaaaagggaaggcaggcatcacagggaaacagccaagaatccaaataatgaaggactcttgccaatctgtgagctcgttgtctgggcatctgtctgtctgaccatagttcagagctggtgcagatgaagaggctggtgcagatgaagaggcttgtgcagatgaagctgctgcctttgcaaaggcagcagagcaagcccattctgagagcgtattcactctctgctgcattcctcacgtttgttaacacaatgctattatttattcctaatctttacagtttggtttggatttcacaaccacttttttggtgcaagtcatgggtttttttagaagtgtatctagagtgttctctaaaactttgctccgtgaggttgagtaactgaaagcagctaaacaatgaggttggcgagaggaaagcgagctctttgggtctcgactctgtgcgttgggaatctggttcttcccacacagtggaatgtggttctcccagccctctcggggtctattagagagagagagagagaactatagaccatggaaacgaaccctggactcaattacatgagccaggcgcagcagagaggcagggaggccacagggctctgccaccttaagctgtactacccttttctagacatgggatccaggtgtcctggtatcagagatccttgccctcctaaagccactagacactcttagcccacttggatctgttctttggtgttagtcttttgcagagaggggcagggaaccttcccttcctacttccaatcctctaatctgtggttcttcctagagaatcaccacctgccagggagtcagagaggtggctcagttagccaactacttgcctagcaagcaggtgggcctaatttggatctcctgaacccatgtaaaatggcagatgtggcagcttttgctgataatctcagtgctgtggaggcagagacaggaggatccctgagcagaaaagccctactgatgagctccaggtcaaacacaaatcctgtttaacaagaggcagattatattcctaaggactgacagctaacattgctctctagccaacacacacacacatcaagtatataaaaagtctggttttcccaggcaggaagctaacctcatacaactactaaagccagcagaggctgaactgccttaatctggatgtcacccaaccctgctattccacatttctgccattcccaggtacgctgcttggttttatcaacttgacacaaacctagacctatctgggaagaaggaatcttagttgagaaaatgcgtcctaaaatgccccgtaggcaattctgtaaggcatttttaaaattagtggttgatgtggagaagctggcctgctgtgggtggtaaccatccctgggtgagtggttctggatataagaaagaaggctgagcaagccagtaaccaacactcttccctggctcctgcttcagtttctgcctctaggttcttgctctgaatccctgccctggcttcccttggtgatggagtgtgaaataaaccctttcctctccgagct

SEQ ID NO: 111 - DNA, 1890 bp, Mus musculus
cgcgcggtcaggaacatggaagagggcagcagcggcggcagtggtagcagcgacagcaacgccggcgggagcggcggggtgcagcagagagagctggaacgcatggctgaagtcctagttacgggagagcagctccggctgcggctccatgaagaaaaggttattaaagatagacggcaccatctcaaaacctacccaaactgctttgttgcaaaagagctgattgactggctcattgaacataaggaggcctctgaccgagagacggcgataaaactcatgcagaaattagccgaccggggcatcattcatcacgtgtgtgatgagcacaaggaattcaaggatgtaaaactcttctaccgctttaggaaggatgatgggacctttgcactggacagtgaggtgaaggccttcatgagaggacagaggctctatgaaaaactgatgagccctgaaactacactcctccagcctagagaggaggagggggtgaagtatgagcggaccttcatggcatccgaattcctggactggttggttcaggaaggtgaagccacaacaaggaaagaggcagagcagctttgccaccggcttatggaccatgggatcatccagcatgtgtctaacaagcacccgtttgtggacagcaacctcctctaccagttcagaatgaacttccgtcggaggcggaggctgatggagctgctcaatgagacgtccccgtcctctcaggagacgcatgacagtcccttctgtctgaggaagcagagccacgacagtcggaaatctaccagctttatgtcagtcagccccagcaaggagatcaagatcgtgtctgccgtgcggaggagcagcatgagcagctgcggcagcagtggctacttcagcagcagccccacactcagcagcagcccccctgtgctctgcaaccccaaatctgtgctgaagagacctgtcacttctgaggaactcttgactccgggggctccgtacgcaaggaagacattcacgattgttggtgacgcagttggctggggctttgtggtacgaggaagtaaaccatgccacatccaggctgtggaccccagtggacctgcagccgctgcagggatgaaggtctgtcagtttgtcgtctctgtcaatggcctcaacgtgctgaatgtagactaccgcaccgtgagcaatctgattctgacaggcccaaggacaattgtcatggaagtcatggaggagttggactgctgagcacagagacatccctgcttgtcccctatcccagaacaacacaacagtggcgaggcaaggctgccaggcacatggataattgggacattgcagatcttttctctgatcatatgcaccttgtctttcatacgctgtttgaatgtggaagaaccaggttacatatctttaaaaaccaaaacacagcaggggcttggtggctcaagtctataatcccagcattcaggagggcaaggcagaagtgctgcaaattcaaggcaagcgtctactaacagtgtgagtgcctgtctcaaaaaccacactcgggatctttccacacaagtgcacataccacacacatgcacacacacacacatgcacaccacacacacacgcaccaaagcccagtttagagttctcaatcattgttcttcatgttttcgggaagttgttgtgaaaccaaattagcaacatggaaaaatgccatttttagaaggtcatagaatagttactacatattttacgtcatgcctactgtgcttgtgtggtaagaataaggaaccagcacctgcaatctgggctacttaggatgctgaggcaggaggatgatcacttgagttctggtagtaatgtgagcctgggcaacatagtgaaaccccacattaattt

SEQ ID NO: 112 - DNA, 2391 bp, Mus musculus
gtaccaaagttccgcaagaggagcaagacagcaactccaataagtgtctgctcaggacacagcttcagccctttgtggtctgctgtctcccaagggctccaggacctttggaattcttgtcacttccattcaagggcctacaaggacctcacgaggtgtttgggatccccctgagatccacgtgaccatgacccgggatgacgccctccctgactcgcattctgcacagactttctacgagaactatgagcccaaggagatcctgggcaggggagtcagcagtgtggtcaggcgctgcatccacaaacccacatgccaggaatacgcagtgaaaatcattgacatcaccggaggaggaagctttagctctgaggaggtacaggagcttcgggaagccaccctgaaggaggtggacatcctgcagaaggtctcgggacaccccaacatcatacagctgaaggacacttacgagaccaacactttcttcttcttggtatttgatctgatgaagagaggggaactctttgactatctcactgagaaggtcaccttaaccgagaaggaaaccagaaagatcatgcgggccctgctggaggtgatctgtaccctgcacaaactcaacattgtccatcgggacctgaagccggagaatatccttttggatgacaacatgaatataaagctcacagacttcgggttttcctgccagctgcagccaggagagaagctccgagaggtttgtgggactcccagttatctggcccctgaaatcatacagtgctccatggacgacggccatcctggctatgggaaggaggtggacatgtggagcacaggcgtcatcatgtacactctgctggctggctccccgcctttctggcaccggaagcaaatgctgatgttgcggatgatcatggacggcaaataccagtttggctcaccagagtgggatgactactctgacacagtgaaagacttggtgtctcgattcttggtggtgcaacctcaggaccgctgctcggcggaagaggccttggcacaccctttctttcaggagtacgtagtagaagaagtacggcacttcagcccccgagggaagttcaaggtgatctgtctaactgtgctggcatcagtaaagatctactaccagtaccgtcgggtgaagccggtaaccagggagatcgtcatccgagacccctacgcccttcggccgctgcggaggctcattgacgcctatgctttccgtatctacggccactgggtgaagaaagggcaacagcagaacagagccgccctcttcgagaacacgcccaaggctgtgctcctctccttggctgaggaggaggacttctgaagggcagcgggggcccaggggaaagcagacagagggacttgtgagaagaggatgccccaagtagccttctgcaaaggaataggtggccctactctgtgctctcaaaggcttgcctctagaagcacagggtgttcccagtaaacagcagtaattacagctggagctggatgtgctgtggcatgtgcctgttgccccgagacagtaggatcacgggttctagcccagcccgggaagtctagtgatgcttatttcaaaataaaaatgaggctgggaatgtaaccctgtggtgagtgtaaggtctccaaattcaacctctggtacagctaaaatagataataaataaataaataataaatccaacgcagctgagaccgtgataggcagaaatggaagggcatagagcacatgtattctgggagctataagccttctggcttctctactgtgcacctttgttgatgtctatagttttcttgtttttttttttaagatttatgcattttatgtatgttttagctgcatgcattttatgtaacccacatgcatgcagtacctgtagaggtcacaagaaggcatcagaaaccctgaaactggagttgtatagatagctgagcccaccttgtgggtggtaggaattgaacccctcctcagcaagaacaggcgctcataactgtctagctaaagttatggatatttgaggaagtgaaagcaggagttcaaggtcatttgtggctacacaaggagcttgaggctagcctgggctacatgaaaccctatctcaaacaacaattatattgtgcttcctgatatacataagaatttattgacctcgggctggtgtgatggctcagtgggtaagagtacccgactgctcttccaaaggtccagtgttcaagtcccagcaaccacatggtggctcacaaccatccgtaacgagatctgatgccctcttctggtgtgtctgaagacagctacagtgtacttacatataataaataaataaatcgaaaaaaaaaaaaaaaaaaaaaaaaaaaaaa

SEQ ID NO: 113 - DNA, 1755 bp, Mus musculus
ggcagtctggagactctgacaaaggagcagggagcagtcgagctgctttccgaggagccagtgttgctgagattgccaaaatgctttggagtttttaactgaatctaagaaagtccaaactagatttgagactgtaaagccagaagctgcagcaagtgggatccagtgccaatgcatcaacaaaaaagacaaccagagttagtggaagggaatcttcctgtctttgtgtttcccacggagctaatattttatgcagatgatcagtcaacacataaacaagtgttgactctgtacaatccctatgagtttgccttaaagttcaaagttttgtgtacgactccaaataagtatgttgtcgttgatgctgccggtgcagtgaagccacagtgctgtgtggatattgtgattcgtcatagagatgttcgatcctgtcactatggtgtgatagacaaattccgcctccaggtttctgaacaaagccagaggaaggccttgggaaggaaagaggttattgccacccttctcccatctgctaaagaacaacagaaggaagaggaggagaagagaataaaggaacacttaaccgagagtgtgttctttgagcagtcatgtcaaccaggtaaaaacagagccgtctcttcaggacctagtttgctaactgtcttcctgggtgtggtatgtattgcggccctgatgctgcctactctaggggatatggaatcgctggtgcctctctacctccacttaagtgtgaatcaaaaactagtggctgcttatatcttaggtcttatcacaatggctatacttagaacatgagccaggattgagactgacttctgaggcaaatttatcttaaaatatgaatagtgcactgccctttatctctctcactccattaacacactacaaattattgaatgatttcaaataactgcaaatgtataatatatattttcatttagtctataattttatttgaaggactgtatcacttaatgttacagacaacaaagatacttctgagtgacacctaggaaattatttgaagacattctttttaaatctatacctgttgtgcaaataacttcaacgttattgttcatctttttttattttgcactcactttgataagggtcatgggtccttcaaagttttagacctaaatgaacaactgaccagcttgaaaatataaaatgacatttattgcctagacgcaagcaccaacattactatgtaagtcatagatttcctcatcattacaaggagctgctgtggtgtttctaaggggaaacagtcagtgtgtgaggggttgaaaacataaggtacttactgagcgatcatgcttaccctggactcttcaaagaagacaagatgtattgaaatgagcttgtgaactacacaacagactgtggttcaaacaacaggcacctcacagaagtagattggtttttctgtttctaaagaaaggtaggcattttttttaattaattggtccatcctggctttacttctggttaatccttgatgtattaaggagaaaatcactttttgggtttctcccaggtcccttgcttgcctgagtgtaagtgacttgccctggttaggaatgtcagatgacaattagtttctgaggacatgaatttttttacattcaaactcttaagccaagtagagaaagccctagatgcccgtgtctattttgtattggccactgggatgttttttaagtttttatttattcaaataaatttacc

SEQ ID NO: 114 - DNA, 714 bp, Mus musculus
atggccggaccgctggtgcccagctcacagaaggtgctgctactggaactgaaggggctgcaggaggagccggtggagggcttccgggtgacgctggtggacgagggtgacctgtacaactgggaggtggccatcttcgggccccccaacacctactatgagggtggctacttcaaggctcacctcaagttccccatcgactacccgtattccccaccaaccttctggttcctcaccaagatgtggcacccaaacatccatgagacagggttcgtgtgcatctccattctccatcccccagatgacaacccacagggtggggagctgccctcagagcggtggaaccccacacagaatgtcagaaccatcctcctgagtgtaatctcgctgctgaatgagcccaacacctcctctcctgccaacgtggacgcctcggtgatgtacagaaaatggaaggagagcaaggggaaggaccacgagtacacggacatcatccggaagcaggtcctggggaccaaggtggacgcagagcgcgatggcgtgaaggtgcccactacgctggccgagtactgcgtgaagaccaaggcgccggcgccggatgagggctcggacctcttcgactactacgtggacggcgaagtggaggaggccgacagctgctttggggatgaagaggatgactttggcccgaagagtcctgacccacgtccctga

SEQ ID NO: 115 - DNA, 978 bp, Mus musculus
ggcagctcgaaggaagttggccgtgaggacggacgtgaagttctaacttaaggacttcggtgcaacttccggtctgcctacaatgatgtctgcggccagtggtggcttccaacctcgtgagcggcgattttcagtgcaggagcaggactgggagactacgccgcctaagaagctccggcttggggcaggaagcaagtgcggaggccggaggctcattgtggtgctggaaggggccagtctggagacagtcaaggtagggaaaacttacgagctactcaactgtgacaggcacaagtccatgttgttgaagaatggacgggacccaggggaagtcagaccagacatcacccaccagagcctgctgatgcttatggacagccccctgaaccgagctggcttgctacaggtttacatccacacacagaagaacgtgctgattgaagtgaacccccagactcgaattcctagaacctttgaccgattttgtggcctcatggttcagcttttacacaaactgagcgtccgagcagccgacggccctcagaagctattgaaggtaattaagaatccagtgtccgaccacttcccagttggctgtatgaaaattggcacttccttttctgttgaagacatcagtgacattcgagagttggtgcccagtagtgacccagttgtgtttgtggtgggggcctttgcccatggcaaggtcagtgtggagtacacagaaaagatggtgtccatcagcaactatccactctctgctgcgcttacctgtgctaaagtcaccacagcttttgaagaagtatggggtgtcatttgagcccagcagggcctggttctcagacaggaaggactcttggcagtttgtcttttggctcctaagatctgctggaagataatcttctgtaccaagactgcagagtggggagacaacactgtatagttgttttttgtttttcctataaagagttttatttc

SEQ ID NO: 116 - DNA, 2855 bp, Mus musculus
aagcagagcggagccaagagcctgagcaagatgatgatggttatgcagcccgagggtctgggggccggggaggggcccttctctggcggtgggggcggcgagtacatggaacaggaggaggactgggaccgcgacttgctgttggacccggcctgggagaaacagcagcggaaaaccttcactgcctggtgcaactcacatctgcgcaaggcaggcacgcagatcgagaacattgaagaggacttccgcaatggcctgaagctcatgctgctcctggaggtcatttccggagagaggctgcctaggcccgacaaaggcaagatgcgcttccacaaaatcgccaatgtcaataaagccctagacttcattgccagcaaaggagttaagctagtgtccatcggtgctgaagaaattgttgacgggaacctgaagatgaccctgggcatgatctggaccatcatcctccgctttgccattcaggacatctctgtagaagagacctcagccaaagaaggcttgcttctctggtgtcagcggaaaacagcaccgtaccgcaatgtcaacgtacagaacttccataccagctggaaggatggcctggccctctgtgctctcatccaccgtcaccggccagacctcattgactatgccaagcttcgcaaggatgacccaattggaaacctgaacactgccttcgaggtggcagagaaatacctggacattcctaagatgctggatgcagaagatatcgtgaacacccccaaaccagatgagaaagccatcatgacctatgtttcctgcttctaccatgcgtttgctggggctgagcaggcagagactgctgccaacaggatctgcaaggtcttagctgtgaaccaggaaaatgagaagctgatggaggagtatgagaaactggccagtgagctgttggagtggatccgccgcactgtcccatggctagagaaccgcgtgggcgaacccagcatgagtgccatgcagcgcaagctggaggacttccgagactatcgacgcctgcacaagcctccccgtgtgcaggagaagtgccagctggagatcaacttcaacacgctgcagaccaagttgcgcctgagccaccgacccgctttcatgccctccgagggcaagctggtttcggacatagccaatgcgtggcggggactggagcaggtagagaagggctatgaggattggctgctttcggagatcaggcgtctgcagaggcttcagcacctggctgagaagttccaacagaaggcttccctgcatgaagcttggacccggggcaaagaggaaatgttaaaccagcacgactacgagtcagcctcgctgcaggaggtgcgtgcgctcttgcgacgtcatgaggcctttgagagcgacctggctgcgcaccaagaccgggtggaacacatcgcggccctggcccaggaactcaatgagctcgactaccatgaggcagcctccgtgaacagccgctgccaagccatctgtgaccagtgggataacttgggtacactgacccagaagaggagggacgcactagagaggatggagaagctcctggagaccattgaccagctgcagctggagtttgctcggcgggcagcccccttcaataactggctggatggggctattgaggacctgcaggatgtgtggctcgtgcactctgtggaggagacccagagcctgctaacagcacacgaacagttcaaggcaacgttgcccgaggctgatcgagagcgaggcgccatcctgggcatccaaggagagatccagaagatttgccaaacatacggactacggccaaagtccggcaacccctacatcaccctcagttcgcaggacatcaacaataagtgggatacagtcagaaagctggtacccagccgtgaccagacactgcaggaggagctggcccggcagcaggtgaacgagaggctccggcgacagtttgcagcccaggctaatgccataggaccctggatccagggaaaagtggaggaagtaggacggctggcagctgggctggccggctctctggaggagcagatggcaggtctgcggcagcaggaacagaacatcatcaattacaagagcaacatcgaccggctggagggtgaccaccagctgctgcaggagagcctagtctttgacaacaagcacacagtctacagcatggagcacattcgtgtgggctgggagcagttgctcacctccattgcccgcaccatcaatgaggtcgagaaccaggtactgacccgagatgccaagggcctgagccaggagcagctcaacgaattccgcgcctccttcaaccactttgaccggaagcggaatgggatgatggagcccgacgacttccgagcttgtctcatctccatgggttacgatctgggagaagtggagtttgctcgaatcatgaccatggtggaccccaatgcagctggggttgtgaccttccaagccttcattgacttcatgacccgagagactgccgagacagacacggctgaacaagtggtagcctccttcaaaatcctggcaggagacaagaactacattaccccagaggagctgcggagagagctcccagccgagcaggctgagtactgcatccgtcggatggcgccctacaagggatctggggctccatctggagctctggactacgtggctttctctagtgccctctatggagagagtgacctctgacattctccgtggaaaaggagagggggcacttcctgtggtggattcagctgtccctcagggccaggccttcaggtcatccagtgccatgcttctgaataaagatcaggctgtgggcctctccc

SEQ ID NO: 117 - DNA, 2391 bp, Mus musculus
gatcgggccgggagaccggcgtggccatctgcagcttcgccatgtcgtcggtgttcggcaagccccgagctggcagcgggccgcacagcgtgcccctggaagttaacctggctatccttgggcgccgcggagcggcaagtctgccctgacggtgaagttcctcaccaagaggtttatcagcgaatatgatcccaatttggaggacacctacagctctgaggagactgtggaccaccagcctgtgcacctgagggtcatggacactgcagacctggacacccccaggaactgcgagcgctacctgaactgggcccatgccttcttggtggtgtatagtgtcgatagtcgtgcgagtttcgagggcagcagcagctacctagagctgctggccttgcatgccaaggagacacaacgtggctaccctgctctgctgctgggcaacaagcttgacatggcccagtacaggcaagtcaccaaggctgagggtgcagctttggcaggcagattcgggtgcctgttttttgaggtctctgcctgcctggactttgagcacgtgcagcacgtcttccatgaggccgtgcgtgaggtgcggcgagagctggataagagtcccctggcccggcccctcttcatctctgaggagaaaaccctgtcccaccagaccccgctcacagcccggcatgggctggccagctgtactttcaacactctctctactgccagcctgaaagagatgcccactgtggcccaggccaagttggtcactgtgaaatcatctcgtgcccagagcaagcgcaaggcacccaccttgactctactgaagggcttcaagatcttctgaggacccttctgcaagaacttaggctcagctgatgcttggggctgcagggaatggtctgtgttgcactctgatgaaccaatggcccttaccctctggtagatagcaggttccacctccagcaccaagcagggtccctatgtgctcactatgtgatccagagggacaggcaaggatgctgctcctgactgcctcaccctgcttccttgccaggcaagggcctgggctccatggtaacctctgcatccaccaccctggaaggaagctgcccctgttacagacaggagacccggagtcagctgcaagcagaaaggaactgcagtacaaatcctgtgtcatgactctcctgctccagccactgccaggccagctgcagccccggttcaaagaggctttgtctatgtgaaggcttgctaacagtctacaggatggctggccccgaggtcctaccatcacctggtggtagaaagaggccagctgttcagaggcccaaagtttatccaagaaaattctagttaaaataatcctatgtgaaggcttggatagggcaaagacacttggacaggagtccttcagcatttacctctaaatgaagggtgcagagaaggtctgtgggttgtccaggctaaaaagcctccaacatttttttcaccagcatttgggggactactatgaccactttgttagtagacacccccccctccaggactctcttcttgagcttgatgaccaaggctgcagaaaatcattctacccaggcacagtcctcagggagtccacagctggtgggattagacatcctctggtgggagccactggcctgcccactgtaaagtaggtgcagtctggtttggttggtcctaggaccttagcaatgggattgattgttcaacacctattttggtaagatagatcccaaagcatttgagattaatatgacagaattttacataaactattcagtattttaccaaggctcatgtgtaagaagtctgtcccaggcaggagctgcagcgatttcttactgtttaccacaaattctggatgagcaggctcaggaacagggcatgagaaggcctgggctgggcaccctaggaaagctggctcctttggctcccagatagcaagcagcccaggcgcttgaatggagaagatctctaacccagtcttcagctctagtcgatagctggagaagctgaggtcagagggaggccctgacctacccaggggcacatcctgcaagtcctggccctttgtcctgaccaatggccagctctgaactttatacttttaagatagggtctctttattatgtaggtctggctgtcctggaactcactatgcaaaccaggctagagttgaactcacagagatccacctgcctcagccttctgagcgctggaattaaaggcttccacctcacatggccgaactttgtattttcaatgcaagcccctagtgtgtgctttgtagacacaatcatctgaacccaggacacaattccagctgcccacctggagaggcatttgaataaaagacttttttaaataacg

SEQ ID NO: 118 - DNA, 2384 bp, Mus musculus
ggactgcggcgcggcggggcgatgtgagtgccatggcgaggagtctctgcgcgggggcctggctgaggaaaccccattacctccaggctcggttgtcctacatgcgggtgaagtatcttttcttttcctggctggtggtttttgtcggaagctggatcatatatgtgcagtattcaacctatacagagctatgcagagggaaggactgtaagaaaatcatatgtgacaaatacaagaccggagttattgacggacctgcatgcaacagcctctgtgtcacagaaacactgtactttggaaaatgtctgtccaacaagcccagcaaccagatgtatttaggagtttgggataatctaccaggtgttgtgaagtgtcaaatggaacaagctcttcatcttgattttggaactgaattggagccaagaaaagaaatagtgctatttgataaaccaaccaggggaactactgtacagaaattcaaagaaatggtgtacagtctctttaaggcaaaattaggtgaccaagggaacctctctgaattggttaatctcatcttgacagtggctgacggagacagagatggccaggtctccctaggagaagccaagtcagcatgggcacttcttcagttgaatgagtttctcctgatggtgatacttcaagataaagaacacacccccaaactaatgggattctgtggtgatctctacgtgatggaaagtgttgaatatacctctctgtatggaataagtctaccatgggttatggaactttttattccatctgggttcagaaggagcatggatcaattgttcacaccatcatggcccagaaaggcaaagatagccataggacttctagaatttgtagaggatgttttccatggcccctatggaaactttctcatgtgtgacaccagtgccaaaaacctaggatataatgagaagtatgacttgaaaatggtggatatgagaaaaattgtgccagagacaaacctaaaggaacttattaaggaccgccactgtgagtctgacctggactgtgtctacggtacagactgtagaactagctgtgacctgagtacaatgaagtgcacttctgaagtaatacaaccaaacttggcaaaagcctgtcagttactcaaagactacctactgcacggtgctcccagtgaaattcgggaagaattagaaaaacagctttattcttgtattgctctcaaagtcacagcaaatcaaatggaaatggaacattctttgatattaaataacctaaaaacgttattgtggaagaaaatttcctacacaaatgactcttagttcatttggactactgccatcattgagaatctacttatgattttgagcatttaaagagtggcttctgccccccaggcctgtggagtcatcatcttaaatgcatgttgtaacaataatggcaggtgtagggccaagatgtccaaaactcatccctgcccttttacaagtccacaagtatattcactgttaactatcttgactttaaaaaaaaaaattaatgctgtgaaaatcctcattccataaacagtgagtgttctgtagatgttagccagtcccattgccggacattgtttgcattgaagctgctgtttaaacaaggaaatttatacatgaatttactaatgttttagcatggtaaaactttgcacattaacacaaattaagaatgccacacaggtaaattcaaatgactcatttattaaaaagttcagttaatatagcatgatttactgtgtacttacacactttaacttcagatggagtcaactgtggaatggcttttagcttcggcatatattctacatgctgaagttagcatgcagttatcactgtgactgaaactcattatctttaagctctgataggttcatcttagtatcgtcacattatctttgctggggatgtaggtaagcagttaactgtttacctgacctgtgtagccccagtaccacagagcctgacactgtgaggcaaggcaaagatgataaagatgcacagcacctcagctaagactggattaagtcaggaagacaattcttgctccttctgggatgaagggctatttactaagaggcataagcacctaatgctttcccaagtgaacctgatattcaaggtttaatatttgaccctttcaagttattttcctatgtacattcatgtctggcatgtaccataaaaatgaaacgtcctagacacccccttctcctcaaaccaaatttcaccgttgttctcaaatctttaaagccatggattagcaccagttgttcacttccaagattgaccttgagatactttcttcccactaatcaatttgtttgtaataaatgtcctgatgatcatgct

SEQ ID NO: 119 - DNA, 3114 bp, Mus musculus
aagagactgaactgtatctgcctctatttccaacagactcacgttcaactttcgctcacgaaaatagccgggaaaattttattagtcctttttttaaaaaaaagttaatataaaattatagcaaaaaaaaaaaaaaaaggaacctgaactttagtaacacagctggaacaatccgcagcggcggcaggagcggcgggagaagagatttaatttagttgattttctgtggttgttggttgttcgctagtctcacggtgatggaagctgcacattttttcgaagggacggagaaactgctggaggtctggttttccagacagcagtccgacgcaagccagggatctggggatcttcgtaccatcccaagatctgaatgggatgtccttttgaaggatgtgcagtgctcaatcataagtgtgacaaagactgacaagcaggaagcttatgtactcagtgagagtagcatgtttgtctccaagagacgtttcattttgaagacatgtggtaccaccctcttactgaaagcactggttcccctgttgaagcttgctagggattacagtgggtttgactcaattcaaagcttcttttattctcgtaagaatttcatgaagccttctcaccaagggtacccacaccggaatttccaggaagaaatcgagtttcttaatgcaattttcccaaatggagcagcatattgtatgggacgcatgaattctgactgctggtacttgtatactttggatttcccagagagccgagtaatcagtcagccagatcaaacactggaaattctgatgagtgagcttgacccagcagttatggaccagttctacatgaaagatggtgttactgcaaaggatgtcactcgtgagagtggaattcgtgacctgataccaggttctgtcattgatgccacactgttcaatccttgtggctactcgatgaatggaatgaaatcggatggaacatattggactattcacatcactccagaaccagaattttcttatgttagctttgaaacaaacctaagtcagacctcctatgacgacctgatcaggaaagttgtggaagtcttcaagccaggaaaatttgtgaccaccttgtttgttaatcagagttctaaatgtcgcacagtgctttcttcgccccagaagattgacggctttaaacgtcttgattgccagagtgctatgttcaacgattacaattttgtttttaccagttttgctaagaaacagcaacaacagcagagttgattaggaaaaatgaagaagaaaaaacgcaaaaagagaagacacacaggaggtggtggctgctttctagatgctgatcctgagggccatgctgaccatgaccaccacctcgtagttgcagaaagccctaggtgtaatgatagtgcaatcattttgaagtgtatgcattattatatcaaggagttaggtatcttgcatgaatgctctcttctgtgtttaggtgttctatgccactcttgctgtggaactgaagtgcatgtagaaaagacctttgactgtatgaatctttacgacacttgtgaaaatgatacaatttggtttatgcacagtgtaatatttctgcaggcatcatccaaaattccccacagacaaggctttcgtccccattagatgcggcctcagctgacatctgtgactgttctattaaatgctgccagagtttttacatccaggcacctccactttctagggcatattctctactaatgttactcaaaaccaatttctacttcatacaggtgttttatgcaatggcaattaaagtttttcttccacaagttgagtctttgtaagaaaatgactccagttgcttgttttatgttctgctgttttaataattgctcctgcatttagagtcctatagtttttgcaccacctttgatgaagcaatacactgttacactgtgggcttatattataattttactccccaggtgagagtttggagatggtcccttgcttaattttttttcctaagacataagaatgtggtctctttattggcatgaacttctgtggaagataaatgacaaaactgaatgtatcaaatgaaaagaactcacagtctccagggcgatgagaaggagaacccattaaagaaaactccatggaaatgataggctgtgcagtgcacttaattagcgttaatggagtgcctactatgccctcactaatttactaagtgataggaatgtccactatgtcaaagcagaaatgtagtcctagcattctgacctcagtaagtgctgccgttgccaccaggttttatttactaaaggagattttgattcgaaggagaatctggtttctacttgtcctaccgtcagctggtctctggtcttcctttcaccgtggccttcagatgatcagatgaatgactgaccagagggaggaggcctctccaggttactcagccagatagtgaatgtatgaatggatggaacggcgcaatattctgaatctatttaatggtcactagaaataatgggcgttgaagagtacggcatgttggtgggacttaaacagaaaagagcaaactggactaaactccctatttattgcccttctgctttcttggtagtttctggactgatgcagtgatgttttgttccttccgtatttataacgaaacacttttttagcgtttctaaacagagtctacttggtttgagatcaagtggttggaacactgtctggactctttctacacggtgttgattgaaggcttctttggggaagctttcggtcagctttatctgtctgattctgtaatgagcacagcacctattttgaattgctatttggagggccagtgcttatttaagctggattttgtaacccagtagattttggcttgaggtctgatttccccgtcttaaattaagaatcctaatgttgagaattgcataggtttgtgtggaacaaagcctagggcaactgtaggtaaactagtgatctagtctaattacaggtggggaagttttggtgccataatttctctttgttggtgttggacttttaatcagctgaaatgtatttctgtaccacaatgtaagcttcaataaaagtctgctcc

SEQ ID NO: 120 - DNA, 1046 bp, Mus musculus
gaagttaggaaggaagggtcagaggtcgccggcccagatgcgttcctgtgttgttatgtagtggagggtcacgttccttcctgcaaattctggaaggttcttgagttcaattaggacagtggctgcggaattcctggtgtccggcctgaggtgcccgctggcctagcagaggcgccgagggcgctgccatgtttggctgcctggtggcggggaggctggtgcaaacagctgcacagcaagtggcagaggataaatttgtttttgacttgcctgattatgaaaatatcaaccatgttgtggtttttatgctgggaacaatcccatttcctgagggcatgggaggatctgtctacttttcctatcctgattcaaatggggtgccagtgtggcagctcctaggatttgtcacgaatggaaagccaagtgccatcttcaaaatatcaggtcttaaatctggggaaggaagccagcacccatttggagccatgaatattgtgcgaaccccatctgttgcccagattggcatctcggtggaattgttggacagtctggctcagcagactcctgtaggcagtgctgccgtgtcctccgttgactcctttacgcagttcacacagaagatgttggacaacttctacaattttgcttcatcatttgctctctctcaggcccagatgacaccaaatccatcagaaatgttcatcccagcaaatgtggttctgaaatggtatgaaaactttcaaagacgactagcacagaaccccctcttttggaaaacataatttgaataaaataacttgtcatgtgatgtaaaagcatgaagtcaaaagggtcatgaaacctacctttcaaaaaaaacctgcttagtgactatgagacttataaaacccttataaaaattagaactattgaatgaggaaaatgttcaatattaattattttctcccttataagtgtgacatacttcttggaggcaaacattttgtataaactgtcattcatttcttaaaataaaccctactctcattagtagtatttgaaatacc

SEQ ID NO: 121 - DNA, 1283 bp, Mus musculus
gagagcgcctggcactgccccagcagccggttactcccctcggtagcagtctcgttctgaagtccgagtgccggtcagggtccagaaagatgtgggtgtttggttatgggtccctcatctggaaggtggacttcccctaccaggacaagctggttggttacatcacaaactacagtcggcgcttctggcaaggtagcacggaccaccgcggggtcccaggcaagcctggaagagttgtgacccttgttgaagatcctgggggcagtgtatggggtgttgcttacaaactaccagtaggaaaagaagaggaagtaaaaacataccttgacttcagagagaaaggaggctacagaactacgacagtcattttttatccaaaagattccacaacaaaaccattcagtgttttgctctacattggaacatgtgataatcctaactatcttggccctgcacctctggaagatattgctgaacaaatttttaatgcagctggtccaagtggaagaaatacagaatatctttttgaacttgcagattctgttaggaaacttgtaccagaagatgcagacgagcatctcttctctttggaaaaattagtaaaggaacgcttagaaggaaaatagaaactgatttgcatacagagtcaccaacgcacccaaagaggcaagagttttagtcttcagaaaataacatcagtacagaacatcagtatgttttagacattcttccttgaagatcttactatttaatattgtaattggaatatcatctagatttacgatgtctttgcaagtgtcctgaaacatatccaacagattctcacaatgggaaagagttcacgttgtaaaagtgatttcctagttatactacatttcaacatttgttcattagaaatgcaggtctcaattaacttcctgtttctattagaataaccatggtttgttgtacgtaagtttaaaataatgttattagaaatatagaagaggtaaggttacagcactgattgttaatatccttgttatttggaattaaatgaacctaaaatttagaccaaaagaaattgtacttttcttttaatgtaaattatccctttgggattataatatgctttctattcctttgggttaagaaggtattttataaccaagaaaactacatagagctatccatatataaaaccactatgataatcatatttactttgtatttatttcataatgaaactttaaaataaaagataggttttctggtggaaacataataaaaattgtgtttaaaac

SEQ ID NO: 122 - DNA, 1813 bp, Mus musculus
gttataacgtagaggggcagtagagtttgctccggtctcgcgcacgaggtgctcgtgtcccgctgcccagtgcccgcagtgaagatgtcccacgcatccccggcagccaagccctccaactccaagaacccgcgagtcttctttgacgtggacatcggcggggagcgagttggccgaattgttttagaattgtttgcagatattgttcccaaaactgcagaaaattttcgtgcgttgtgtacaggagaaaaaggaactgggtccacgaccgggaagcctctccattttaaaggatgccctttccaccgaattattaagaaatttatgattcagggtggagacttctcaaatcagaatgggacaggtggcgaaagtatttatggtgaaaaatttgaagatgaaaattttcattataagcatgatcgggagggtttgctgagcatggcaaatgcaggccccaatacgaatggctctcagttctttatcacaacagttccgactcctcatctggacgggaaacatgtggtatttggtcaggtcataaaaggactaggtgtggcaaggacgcttgaaaatgtagaggtgaatggtgaaaaacctgccaaactctgtgttattgcagaatgtggagaattgaaagaaggggatgactggggaatcttccccaaagatggctctggtgacagtcatccagacttccctgaggatgcagatatagatttaaaagatgtagataaaattttattaatatctgaagacttaaaaaacattggaaatacttttttcaagtctcagaactgggagatggctattaaaaaatatgcgaaggttttaaggtatgtggatagttcaaaggctgttattgagaaagcagatagatccagactgcaacctatagccttaagttgtgtgctgaatattggtgcttgtaagctgaagatgtcaaattggcagggggcaattgacagttgcttagaggctcttgaaatggacccttcaaatactaaagcactataccgaaaagcgcaaggatggcaaggattgaaagaatatgatcaagcattggctgatcttaagaaggcacaggagatagccccaggagataaagctatccaggcagaattgcttaaagtcaaacaaatgataaaggcacagaaagataaagagaaggccgtgtatgcaaaaatgtttgcttaataatgattaaactctctttaactattatacattgattatctaaaggacaaggtatattactgtctacatgctccctgttgtgtttcccttgatctctgtcattgtttacatagcagtgctgacacaggttccttcttaataaagagttaaaaaatacagtgaatctcattttaaaatgtttgtctgcattttcaccaagagtgtatctggccaatgtttaaactctaactctcactaaattttcggctttgtggatggtctagcccagcagttcttaacctgatggtccactgaaaaacatagatatttttacagtatggttcagagcagtagcaaaattacagttgtgaagtagcaacaaaaataaatttatgtttgggggtcaccacatgaagaactgtactaaaaggttgcagcactagtaaggttgggaaccactgatgtaactgtcacgtttatgtgtattaaccagctatgtgtataaaccatcgggcatggctgtgtttcaataaatcggtttttaagtgttcaaaaaaaaaaaaaaaaaaaaaaaaaaaaaaaaaaaaaaaaaaaaaaaaaaaaaaaaaaaaaaaaaaaaaaaaaaaaaaaaaaaaaa

SEQ ID NO: 123 - DNA, 496 bp, Mus musculus
cgcacacagacatagacacacagacacagacacacatagacacagacacacacacagacaccaaagcctccaacctctaccatgaagatcgccatcacaatcactgtggtcatgctgtccatctgctgcagctcagcttcttcggacatctgcccaggatttcttcaagtccttgaggccctcctcatggaatcagagtctggttatgtggcatccctgaagcctttcaaccctggctcagacctgcaaaatgcgggcacccagctgaagagactggtggataccctcccacaagagaccaggataaacatcatgaagctcacggagaaaatcctaacaagtcctctgtgtaagcaagatttaagattctgaagctcactggatttcagagatattctactgctaaagccttgtcactgccctgtgtctcctcggctcctcggcttccccacaccaacccctccttcctctttgcaataaactgcgagcatctcac

SEQ ID NO: 124 - DNA, 1051 bp, Mus musculus
agaccatgagcgcggcgggtgaccttcgtcgccgcgcgcgactgtcgcgcctcgtgtccttcagcgcgagccaccggctgcacagcccatctctgagcgatgaagagaacttaagagtgtttgggaaatgcaacaatccgaatggccacgggcacaactataaagttgtggtgacagtccatggagagattgatcctgttacaggaatggttatgaatttgaccgacctcaaagaatacatggaggaggccatcatgaagcctcttgatcacaagaacctggacctggatgtgccgtactttgcggatgctgtgagcacgacagaaaatgtagctgtctacatctgggaaagcctccagaaacttcttccagtgggagctctttataaagtaaaagtgtttgaaaccgacaacaacatcgtagtctataaaggagaataggtcttagggttgctattgtagacaggcacatttcttttcacacttgaaaaaggctttgtccttccagagttcgcagcagtcaccacatgcttgtgtctccatgttctgttctagagtacccgagcattaaagtaatgtaaggcctgtatttagatgtatttacgaatcaaactttcagtgtatcctgcatgtggttttggtgagaaggtagagaaggattgaggattgacaccagggcctcacacgggaagcatagactcttctgaagtgcattccagtcctctcaaggctatttagagggtcttttatctagaggtttaaaattatttcatcttgggctggagagatggctcagccgttaagtacactgactgttcttccagaggtcctgagttcaattcccagaaaccacatgatggctcacaaccatctataaagggatctgatgccctcttctggcatgtagttgtacatgcagacaaagcattcctacattaaaaaaaatacataaataaaatttaaaaataatttcatttgagcaaaatgttttgatgtggaattatgcaaaggtaaaataaacccatttttgttatctaaaaaaaaaaaaaaaa

SEQ ID NO: 125 - DNA, 3207 bp, Mus musculus
ggtcttaacgcgcccgcccgcagcacccgtcctcggtcactgctggtcgcttcctgagccgctgctggctctgtgtctctgtcctcagcgttctcgtcctcgtcctcgtcctcgtcctaccacgccatggaaggttaccataagccagatcagcagaagctccaggccctgaaggacacagccaatcgcctgcgcatcagctccatccaggccaccaccgcggcaggctcaggccaccccacatcatgctgcagcgctgccgagatcatggctgtcctgtttttccataccatgcgttacaaggccctggatccccgaaaccctcacaatgatcgatttgtgctctctaagggccatgcagctcccattttatatgcagtctgggctgaagctggcttcctacccgaggccgagctgctgaacctgaggaagatcagctctgacttggacgggcatcctgtcccgaaacaagccttcaccgatgtggccactggctccctgggccagggcctgggagctgcttgcgggatggcatacacaggcaaatactttgacaaagccagctaccgagtctattgcatgctgggagacggggaggtctccgagggctccgtctgggaggccatggcctttgctggaatttacaagctggacaacctcgttgccatttttgacatcaaccgcctgggccagagcgacccagccccgctgcagcaccaggtggacatctaccagaagcgctgtgaggcctttggctggcacaccatcatcgtggacggacacagcgtggaggagctgtgcaaggcctttggtcaggccaagcaccaaccaacagccatcattgccaagaccttcaagggccgagggatcacagggattgaagacaaggaggcgtggcacgggaagcccctccccaaaaacatggccgagcagattatccaggagatttacagccaggttcagagcaaaaagaagatcctggccacgccccctcaggaggatgccccatccgtggacattgctaacatccgaatgcctacgccacccagctacaaagtgggggacaagatagccacccggaaggcctatggactggccctcgctaagctgggccacgccagtgaccgtatcattgccctggatggagacaccaagaattccaccttctcggagctcttcaaaaaggagcacccagaccggttcattgagtgctacattgccgagcaaaacatggtgagcattgccgtgggctgtgccacacgtgaccggacagtgcccttctgcagtactttcgcggccttcttcacacgggccttcgaccagattcgcatggccgccatctctgagagcaacatcaacctctgtggctcccactgtggtgtgtccattggggaagacgggccctctcagatggccctcgaagacctggccatgttccggtcagtccccatgtccaccgtcttttacccaagcgatggagttgcaacagagaaggcagtggagttagcagccaacacaaagggcatttgcttcatccggaccagccgcccagagaatgccattatttatagcaacaatgaggatttccaggtcggccaagccaaggtggtcctgaagagcaaggatgaccaagtgacagtgatcggggctggtgtaactctgcatgaggccttggctgctgcagagagtctaaagaaagataagatcagcatccgggtgctggatcccttcactatcaagcccctggacaggaaactcatcctagactctgcccgagcaaccaaaggcaggatcctcaccgtggaggaccactactacgaaggtggcataggagaggcagtgtctgctgccgtagtgggtgaacctggagtgacggtcactcgcctggctgtcagccaagtaccacgaagtggcaagccagctgagctactgaagatgttcggtattgacaaggacgccattgtgcaagctgtgaaaggccttgtcaccaagggctagggagggcatgggatgctgggtgggtgaactacacattccagggaggttctggcagaggtggcgaaggtgtactgagtggggaggtaaatatatgttttgagaaaaaaattaatcctcagactctttttttttcctgtgatataaacatatccagtgccagtatgagaaggagactggggagagagggagagagctggctctctaggcttggggtcaggatctaggtgtcccctggatctaggtgtcccctggaatccccttctccagttcagcctctgcaaagccacaactgctcccaccaagtcataactggggacactcattgcagcctgccttttagccaaactaggatccagccccttcctttgccagtgtaccctaaatgacaccatggagttccctcctgccttataaaaccttcctgggccctccatagctgcaccatggcccccaaggtcccacaactcctccttttatgggtggtcactgctgtttcctaggaattccgcagtgcccttagggaggatggggcccatttgttgagctatgtgcatgtttgccctttgtcgacaaactgctcagctagcgagttgcctggcccgatccttccatgccagggaactgtatggtaccaactccagaaacagcagagcaggtaggttgtctcagggagatgacagagactcctcagtgggtgatcttagggcacaccctgggaggccttgagctccgcatgtcaggaactctccttcactgagaaaagaaggcaagccatctccctgtcaggacaattgaggaacttctcagccacgagttttgagtctggacataactacaatatgttatgtagttctgaacaaaaacagtaaagcttgggtgcttggtcaccacctggtggccatttatggtactacagtgctaagcacacccctacagaggaatctgaggaaggagactagggatggtgttttctgaactctgtaaagctcacagcaggtggaggtgacagtgacattactgaactttgtatgcattttacttaatccttactacaagaaaccactttagaaggcattccacttggctgagtgctaaggattggtctatgtattgcaatgctaaattctgtacccaaaagtctacaggcttttattgtgcaaaccttcttccttaatttaaaactattgtttaaataaaatggctacagcc

SEQ ID NO: 126 - DNA, 3597 bp, Mus musculus
gggccggccaccgggtttgggagcagcccaggctcaccttaaccggagcggtgcggacggtcccgcggcgacagggctaatctcggcaggttcgcgatgcagcgggcagcggtgctggtgcggcggggctcctgcccccgcgcctcgggcccctggggccgtagtcacagcagcgctgcagccgaagcctcggcggcgctcaaggtgcgaccggagcgcagccctcgagaccgcatcctcaccctggagtccatgaacccgcaggtgaaggcggtggagtacgctgtgcggggacccatcgtgctcaaagccggcgagatcgagatggagctgcagcggggtatcaaaaaaccattcactgaggtaatccgagccaacattggggatgcccatgctatgggccagcagccaatcaccttcctccgtcaggtgatggcactctgcacctacccaaacctactaaacagccccagcttcccagaagacgctaagaaacgagcgcggcggatcctgcaggcttgtggtggaaacagcttgggatcttacagtgctagccaaggcgttaactgtatccgtgaagatgtggcagcctttatcaccaggagagatggtgtgcctgcagacccagacaacatttacctgactactggagctagcgacggtatttctacaatcctgaagctcctggtctccggtggtggcaagtcacggaccggcgtgatgattcccatcccccagtatcccttgtactccgcggtcatctctgagctcgacgcggtgcaggtcaactactatctggatgaagagaactgctgggctttgaatgtggacgagctccggcgggcattgcggcaagccaaagaccactgtgaccctaaagttctctgcattatcaaccccggaaaccccacaggccaggtacaaagcagaaagtgcatagaagatgtgattcactttgcctgggaagagaagctttttctcctggctgatgaggtgtaccaggacaacgtgtactctccagactgcagattccactcgtttaagaaagtgctttaccagatggggcacgagtactccagcaacgtggagctcgcctccttccactccacctccaagggctacatgggcgagtgtggctacagagggggctacatggaggtgatcaatttgcaccccgagatcaaaggccagctggtgaagctactctcggttcgcctctgtccgccagtgtcaggacaggccgccatggacattgttgtgaatccaccggaaccaggagaggagtcctttgagcaattcagcagggaaaaagaattcgtccttggtaatctggccaaaaaagcaaagctgacagaagatctgtttaaccaagtcccagggatccagtgcaaccccttgcaaggagctatgtatgcgttccctcggattctcatccctgccaaggccgtggaggcagctcagtcccataaaatggctccagacatgttctactgcatgaagctcctggaggagactggcatctgtgtcgtgcctggcagtggctttgggcagcgagaaggcacttaccacttcagaatgaccattctccctccggtggataaactgaagaccgtgctccacaaggtgaaagactttcacctgaagttcctggagcagtactcatgaggacgcctcaggcaccggagccagaccctcccaagaccacccaggccttcctcaaggactctgcctcagacctcagacaggccaccaacgctgttcatcttcatttccccaaggagacttctttctttgtgccttgatgtttgagagttcttcgagcaaacagtggttttgcaatgtctcacaggccctgtttttgtttttgtttttgttttgttttgttttgttctttttttaaatgcaaccaaagtagagtcaacctgctcggcagatgtacttggattctctgaatcgctattctgtttggagagttcctttgggtcttaagcagccagagtacatggaaatgagattatgtcagatctggagaaacaagcaggtgttgggaaatatgtgacttgacatgataagggctgggaatccagaaatcaatagtgagatccatgaaatcaaaccctgaccagtgtgaaaatgtagccttttggacagtaagcctgcaagtctagtgagaactcagagaaagctgaccattctggtctgaagataggcagcgcatcacaggcaagaatatcgaagtcagtagtaggacaggggtcacatcagataccagctcaaattgcactatctatctagaacagttttctccaggtttgcctgagccttgatgcataccatcgccctctgctggtcgcagcagagataagcaagggctgaaaatggaggcaatcctttcccaaggccctgaaagttgtttttcatggtttcaaactgaatttggctcatttgtaactaactaatcacggtgcctggttacactggctgccaagaaggagcgcatgcaatctgattcagtgctctcttcacatcagtttcctgcctccctccctcatctgcggacagcatcctatctcatcaggcttccctgtgtgtcacaaagtagcagccaccaagcaaatatattccttgaattagcacacctgggtgggccatgtgcgcaccaaggaaacaggtgctatagggagcgccaggccaggcttgtctcttaactgtctcgttcttcagtgagagtgggaaagctgtccggagctcccgcgcaggagcctgggtacccacgcagcgagtcaagggagttttcggagccagagagagaaagatgtgaaggctgtggagtaaggctgaaaccagcctcctgccctatagtcccacactgcagggggtgcgactttaaaacagaacttcaagttgttaacactcacaagcattgcattactgtgaaggaagtagccgcatccataacaggatgtgatggtctacagcttttcctttaaaagctgaaaaggtaccatgtgtgctcgctaggcatataatccagatatgctccagagttctgagattcttccatgaaaggttaactagaagctagaatatttttttatatttttgtaacaattggcttttttcatggggggaggggagtagagggttagtatttatagtcctaacaagtccaaaaatttttataagtgtcttcagattataaataaccctccaaattttgcaatgtttacatgttttttttttaagatgacaaatatgcttgatttgctttttaaataaaagtttagctgttctaagagattaacttcaagtaggatggctggttatgatagtttggattttctacaggttctgttgccatgccttttgggtttcagcatcactcgagtcgcagcatgtgggtggggctgtggaaacctggccaggctggacctggtcagccacacctcagagacattgtttccatttggatgtgagcaggcgcaggcctgcatgctctttcctacttagcatcatcagttcttccgcctccttagcatggttctttgtaacagccatgctgggaagctctgaacaataaaatacttccagagtggt

SEQ ID NO: 127 - DNA, 897 bp, Mus musculus
atgaagataatttggagtgatctcgtccagggaataattttcatttcacttactggatttggagttttaggaaacttcatattatttgtgagacatgtatatactttcattatgggttctgagaacaaaaatatagatgtaattttcatccacttggcttttgtaaacacaatcattatttactgtataggagtcagaaacatagccacagttttttacatcagaaacttcctaagtgatgttggttgtaaaactatagtttatctagaaagggttgcccgtggcctctccatctgcaccacctgtctcctcagcatggtccaggctgtcaccatcagtcccaggaccacactgtggagaaaactcaaacagcatattcttgcctttctcttcctcttttggatctttaattccctcataagttccaatttgctgcactatatcacagcaggcagtagcatgaataggtctgaaattgggatgtttactggatattgttatatgctaccatccaagcccacagttaagtggctgtttctctctttcatggctcttcgtgatgtcattttccagagtctcatgggatggagcagtgggtcaatggttctccatctatacaaacatcatgtccgtgtcctctatcttcacagctccaggtctgcaaataattctagaccagaaatcagagctacccagagggttctcaccctcatgacatgtttccttttcttttattggacagatttcattttctccttatatataggttctacagtgaaaaatgatttcacaataccaaatatgaaagcattgttagtacttagctatgctggtcttagcccctttatcctgattatctgggatgtccatattgctaagatctgcagtgtctcctga

SEQ ID NO: 128 - DNA, 1282 bp, Mus musculus
ggactcgggtgaagatggcggcagccgaggccgcgaactgcatcatggagaattttgtagccaccttggctaatgggatgagcctccagccgcctcttgaagaagtttcctgtggccaagcagaaagtagtgagaagcccaacgctgaggacatgacatccaaagactactactttgactcctatgcccactttggcatccacgaggagatgctgaaggatgaggtgcgcaccctcacataccgcaactccatgtttcacaatcggcatctcttcaaagacaaggtggtgctggatgtgggctcaggcactggcatcctctgcatgtttgctgccaaggcgggggcccgcaaggttattgggattgagtgttccagtatctccgattatgctgtgaagattgtcaaagccaacaagttagaccatgtggtgaccatcatcaagggcaaggtggaggaggtggagctgcccgtggagaaggtggacatcatcatcagcgagtggatgggttactgcctcttctacgagtccatgctcaacaccgtgctgcacgctcgggacaagtggctggcacccgatggcctcatcttcccagaccgggccaccttgtatgtgacagccattgaggaccgacaatataaagactacaagatccactggtgggagaacgtgtatggctttgatatgtcctgcattaaagacgtggccatcaaggagcccctggtggacgtggtggacccaaagcagctggtcaccaatgcctgcctcataaaggaggtggacatttacacagtcaaggtggaggacctgaccttcacctcccccttctgcctgcaagtgaagaggaacgactacgtgcacgcgctggtggcttacttcaacatcgagttcacccgatgccacaagaggaccggcttctccaccagtcctgagtccccgtacacacactggaagcagactgtgttctacatggaggactacctaacagtgaagactggcgaggagatctttggcaccattggaatgaggcccaatgccaaaaacaatcgtgacttggactttaccatcgacctggacttcaagggtcagctgtgtgagctctcttgttccaccgactaccggatgcgctgaggaggtgccaggctggccctcctgcagaagggggctcggggggatgggcttgggggatgggggggtacatcgtgactgtgtttttcataacttatgtttttatatggttgcgtttatgccaataaatcctcagctgaccatgaaaaaaaaaa

SEQ ID NO: 129 - DNA, 756 bp, Mus musculus
gagtatctggggtgggtatccacagggctaaggttaccacggtatgttaagggctgccggggcaggactatataaccccagaagaactgctccaagcagattctcttccttttttcatctggagctactgccttgcccccaggagatctaagacatggcacccaagaaggccaagagaagggcaggagcggaagggagctccaacgtcttctccatgtttgaccagactcagatccaggagttcaaggaggcgttcactgtaattgatcagaacagggatggcattatcgacaaagaggatcttcgggacacctttgcagccatgggccgtctcaatgtgaagaatgaggaactcgacgctatgatgaaggaagccagtgggcccatcaacttcactgtcttcctgaccatgtttggggaaaagcttaagggtgcggacccggaggatgtgatcactggagccttcaaggtcctggacccagaagggaagggcaccatcaaaaagcagttcttggaggagctgcttaccacgcagtgcgaccgattttcccaggaggagatcaagaacatgtgggcagccttccccccagacgtgggcggcaacgtggactacaagaacatctgctacgtcatcacacatggtgatgctaaggaccaggaataggggacccaaggtctcagaagacctagataggcttgtagccgctccatctctcaccctggccctcaataaaactcaactggtctttgtttctt

SEQ ID NO: 130 - DNA, 1264 bp, Mus musculus
ggcattctggaccgtaaccctcgcttgcaatggctgcgtctttggtcgggaagaagatcgtgtttgtgacgggaaacgccaagaagctggaggaggtcattcagattctcggagataattttccatgcactttggaggctcagaaaattgacctgcctgagtaccagggagaaccggatgagatttccatacagaagtgtcgggaggcagctcgacaggtgcagggccctgtcctggtggaagatacctgtctgtgctttaacgcacttgggggactgcctggcccctacataaaatggttcctacagaagctgaagcctgaaggtctccaccagctcctggccggctttgaagacaaatcggcctatgcactctgcacattcgctctcagcactggggacccaagccagccagtgcttctcttcagaggccagacctcgggacagattgtgatgccacgaggcagccgggactttggctgggatccctgctttcagcctgatggatatgagcaaacgtatgcagagatgccaaagtctgagaagaacaccatttctcatcggttccgggccctgcacaagctacaggagtactttagtgtggctgctggggctggtgaccactagcgccatgggtaggggctagtgcagaactccctaggaggcaggcactcctgtgaggctttctctgggttcccctctgccaggagatccaggcagcatcaggagccagttcttggaagagcagttggctctgcataggggaactctgagccagttgatactaaactcttgtcccttggattcaagagtttcctttgaccaggcatggtagcgcacacttttaatcccagaatttgggaggcagaggcaaacagatctttgtgagctcagggccagcctggtttacatagtgaattcctggatagccagagctacatagtgagaccttgtctcaaaaacaaaacaaagaaaccaaaacaacaacaacaacaaaaagttgttcttgtagcctctggctctgggatcctgggaaaattttggttgtttgttcttatatggttgaaggtttggcaaagaaacacacaacttttggttttagaatatagcaaatgtaaattctagaagactttccaaaataaatggtgtgtctgttttgaaaaaaaaaaaaaaaaaaaaaaaaaaaaaaaaaaaaaaaaaaaaaaaaaaaaaaaaaaaaaaaaaaaaaaaaaaaaaaaaaaaaaaaaaaaaaaaaaaaaaaaaaa

SEQ ID NO: 131 - DNA, 8841 bp, Mus musculus
cacgaggcagcacggatcggctagccgggggacagagacaagatcccagcatcacaacacgacctggcttcgatggagccgctggtcttctatcgttcctttgactgatttaaattttttaatttatattctccccgccccgccccttttccttcgaccccgccccatcaacccgctatttccttgccttttcctcttccccggcttccttctcctcatttctttccctttcgccctccgctcgcccccttgctccctccccttcctctccccttcctccgcggtttcttccgtcctcccccccattccgccccctcctctcccggcactcccgccccctcccccgccccgtgcctgcagacgcgcggatcgtccatgcgctcctcgcaggcagaatgctgggcagcagcgtcaagagcgtgcagcccgaggtggagctgagcggcggcagcggcagcggcggcgacgagggcgcggacgagtctcggggagccagcagaaaggcagccgcggcggacggcagaggcatgctgcccaagcgcgccaaggcggcaggaggcagtggcagtatggccaaggccagtgcagcggagctgaaggtcttcaagtccggcagcgtggacagtcgtgtccccggcgggctgcctacctccaacctgcgcaaacagaagtcgctcaccaacctctcgtttctcacggactccgagaaaaagctgcagctgtatgagcctgagtggagtgatgatatggccaaagcacccaagggtttgggcaaactggggcccaaggaccgcgagactcctctgatgtccaagacgctgtccaagtctgagcattcgctcttccaacccaaaggtggctctaccggcggcgccaagaccccactggctccgctagcgcccagcctaggcaaacctagccggattcctcggggaccctatgcggaggtcaagcctctcagcaaggcgcctgaggcagcggtaagcgatgatggcaaatcggatgacgaactgctttccagcaaggctaaagcgcaaaagggctcagggactgtgccctctgccaagggccaggaggagcgggccttcctcaaggtggaccccgagcttgtggttaccgtgctgggcgacctagaacagctactcttcagccagatgctagatccagagtcgcagagaaagagaacagtacagaacgttctggatctccgacagaacctggaagaaaccatgtccagcctgcgaggctcccaggtgactcacagctccctggagatgccttgttacgacagcgatgacgccaacccccgaagcgtgtccagtctctccaaccgctcctctccgctctcttggcgctacggccagtctagtccccggctgcaggctggcgacgcaccctctgttggggggagctgtcgttccgaggggccaccggcctggtacatgcatggcgagcgggcacactactcccacaccatgccgatgcggagccccagcaaactcagccacatctctcgcctggagttggtggagtccctggactctgacgagggggacctcaaatccggctacatgagtgacagtgacctcatgggcaagaccatgacagaagacgatgacatcacgacgggctgggatgaaagcagctccattagcagtgggctcagcgatgcctccgacaacctcagctcagaagagttcaatggcagctcctcactcaactccctcccaaccactcccactgcctcccgcaggagctccactatagtgttacgcacagactcggagaagcgctccctggcggagagtgggctcaactggttcagtgagtcagaggagaagacccctaaaaaactggagtacgacagtggtagcctgaagatggaacctgggacttcaaagtggcggagagagagaccagagagctgcgatgacgcatccaagggcggagaactgaaaaagcccatcagcctgggacacccagggtccttgaaaaagggcaagacccctccggtggctgtcacctctcccatcactcacaccgcccagagtgccctcaaagtcgcaggcaaacctgaaggcaaagctacagacaagggtaaactcgcagtgaagaacactgggctacaacgctcctcttctgatgctggccgggaccgcctgagtgatgctaaaaagcccccctcgggcattgctcggccctctacttcaggatcctttggttataagaagcctccccctgctactggcacagccactgtcatgcagaccggtagctcagccaccctcagcaagatccagaagtcctcagggatccctgtgaagccagtaaacgggcgcaaaacgagtttagacgtgtccaacagtgtagagcccggatttcttgcccctggagcacggtccaacatccagtatcgcagcctacccaggccagccaagtccagttctatgagtgtgactgggcgtggtggacctcggcctgttagcagcagcattgaccccagcctcctcagcaccaagcagggtggccttacaccctccagactgaaggaaccttccaaggtcgccagtggtcggagcactccagcccctgtcaatcagacagatcgggaaaaggagaaggccaaagccaaggctgtggccctggactcagacaacatctccttgaagagcataggctccccagaaagcactcccaagaaccaagcaagccaccctccagccaccaagttagcagagctgccaccaacccctctcagggccacagctaaaagctttgtcaagccaccctcgctagccaatctagacaaagtcaactccaacagtttggatctaccatcttccagcgacacccatgcttccaaggtcccagatctgcatgctccgagctcatcaactgggggccctctcccttcttgcttcactcccagcccagcacccatcctcaatattaactcagccagcttctcccagggcctggagctaatgagtggtttcagtgtcccaaaggagacccgcatgtaccccaaactctcaggcctgcacaggagcatggagtccctccagatgccaatgagcctgcccagtgccttccccagcagcgcccccatccctaccccacctactgccccatcagaggaagacacagaagagctgccctggagtggaagccccagggctggacaattggacagcagtcagcgagatcggaataccctccccaagaaagggctcaggtaccagcttcagtcccaggaggagaccaaggagagggggcactcccacactgccggtgggcttccagaatccgacgaccaggaagagctgccatccccccttgctctttccatgtccttgagtgcaaagggccagcttaccaacatagtgagtcccactgcggccaccacgccaagaatcacccgatccaacagcatccccacccacgaggcggccttcgagctgtacagcggctcccaaatggggagcaccctgtccctggccgagagacccaagggaatgattcggtcaggatccttccgagaccccacggatgatgttcatggctcggtgctgtctctggcctccagtgcttcttctacctactcctcagctgaggagaggatgcaatctgagcaaattcggaagcttcgtagggagctggagtcgtcccaggaaaaggtggccaccctgacatctcagctgtctgccaacgctaacctagtggccgctttcgagcagagcctggtgaatatgacatcccgcctgcgacacctggcagagacggccgaggagaaggacaccgagctgttggatttgcgagaaactatagacttcctgaagaaaaagaattccgaggcccaggcagtcatccagggagcgttaaatgcctcagaagccacgcccaaagaactccggatcaagaggcagaattcctcagatagcatctccagcctcaacagcatcaccagccattccagcatcggcagcagcaaagatgctgatgccaagaagaaaaagaagaagagttgggtttatgagcttcggagttccttcaacaaagccttcagtattaaaaagggtcccaagtcagcctcctcctactctgacattgaagagattgccacacctgactcctcagccccatcatcccccaaactccaacacggctccactgagactgcctccccctccatcaagtcctccacctcatcctctgtgggcaccgaggtcaccgagacccctgctcattcagtcccccacactagactgttccaagccaatgaagaggaggagccagagaagaaggaggtatcagaactgcgctctgaactatgggaaaaagagatgaagctcacggatatccggttggaggccctcaactctgcccaccagctggaccagcttcgggagaccatgcacaatatgcagttggaggtggacctgctgaaagcagagaatgaccggctgaaggttgcccccggcccctcctcaggctgcactccagggcaggtccctgggtcatcggctctgtcgtcccctcgacgttccctgggccttgcactcagccatcctttcagtcctagtctcacagacacagacctctcacccatggatggcatcagcacctgtggttcaaaggaagaggtgaccctgcgggtggtggtccggatgccgccccagcacatcatcaaaggggacttaaagcagcaggagttcttcctgggttgcagcaaggtcagtggcaaagttgactggaagatgctggatgaagccgttttccaagtgttcaaggactacatttctaaaatggacccagcctcaaccctgggactgagcactgagtccatacatggctatagcctcagccacgtgaaacgagtgctggatgctgagcccccagagatgcctccttgccgccgaggtgtcaataacatatcagtcgctctcaaaggtctgaaagagaagtgtgtcgacagcctggtgttcgagacgcttatccccaagcccatgatgcagcactacatcagcctcctgctcaagcaccggcgcctggtgctctccggccccagtggcaccggcaagacctacttgaccaatcggctagccgagtacctggtggagcgctccggccgcgaggtcacggatggcatcgtcagcactttcaacatgcaccagcagtcttgcaaggatctgcaactgtacctctccaacctagccaaccagatagaccgggaaacagggataggggatgtgcccttggtgatcctcctggatgatctgagtgaagcaggctccatcagtgagctggtcaatggggccctcacctgcaagtatcacaaatgtccctacattataggtaccaccaatcagcctgtaaaaatgacacccaaccatggcttgcacttgagcttcaggatgctgaccttctcaaacaatgtggaaccagccaatggctttctggtccgttacctgcggaggaagttggtagagtcagacagtgacgtcaatgctaacaaggaagagctgcttcgggtgctggactgggtgcccaagctgtggtatcacctccacaccttcctggagaagcacagcacctcggacttcctcattggcccttgcttcttcctgtcctgtcccattggcatcgaggacttccggacctggttcattgacctgtggaacaattccatcatcccctatctacaggaaggagccaaggatgggatcaaggttcatggacagaaagctgcttgggaagacccggtggaatgggtccgagacactcttccctggccgtcggcccaacaagaccaatcaaagctctaccacctgcccccgccttctgtgggcccccacagcactgcctcacccccggaggacaggacagtcaaagacagcactccaaactccctcgactcagatcccctgatggccatgctactgaaactccaagaagctgccaactacattgagtcaccagatcgagagactatcctggaccccaacctccaggcgacactctgagggcccggcagtcactgtcaccctggagggcagaaggctggcttcagcatcattagctctcctctgccctcttccttcatagctctggctcaccagcctcgccaagagaacaggagggaagaagagggcaggaggagggatgggttctcggtgctgaacctttgagaacttcctactaggaattggagggggtggagtttgagaactccgtgccccttaactacatttgctggcctcctcttacgacttaggagaaaagatgattctggtcttttcttcaagttttgtttcacctacaaactcttgggctttctggggagggattcggaagatataaacagacaaacaaaaacaaacaaaccaactacagcagttccaagctcgttctcacaaacacctctgagacagtcacatgtgggcaaatctaagggaggcaggaagctctacagactttcttgcaaacccttcccagttctgtcgacactgccaacaacctccccgccagagacctggccagagccaagaaaagagaagcatgtggtttaacagaaaaacaaaacaaaacaaaacaaaaaatatatgtgtaaatcaacctgtagaaggtaaaaacggcaatggaaaagatgaagctggaaggaggggcccagttgccaagatggaacgagagctgccagatcttgccttctggatgacaagaggggacattgcaagatggctgccagtctaaaacgtcaccagaccacaagagtaacatcacagccttcgaagaaaggccacaagctgtctttctgccctctaactgaacatgcatgaaaagtcaataaaccctactttttaattttaaatttttatttctattttttccttccatttgcctatttatttgtccctcacctccagtttcctcacatcaataagatacttgggtttcctttccaggggatagttttgctttcccaagtgggttttctttggagaatttaactctataatattggtacaagttagccacctcccatgccactgtccctggcatccttggggcttacatgggacaagaaaccattggctcataatagtaagagaagaagaactcagtctctttggttccttttgagaaagcacatgttctacctggaagctcaactgccatcctccagcatggtagatctaccccgagctccatctcggactgggaggaaaaccaaaatactggaaacacctgcctgtcttatggcctgttagggccctcactgcactatttggatggtagccactttgcctgactgaatcaagattccctagctagcccttattatttgtttttgacagatgaatagtcacttataggagatggagcaaccgtgtgacctgcttcagatcagaataaaaggctcaaagagtttgacttggtggccaatatctgccttccaaagagatctacgtcttgcagaagttgccctcttcctaacccacactccttcatttgacaagtacttactgagtatttaaccgagtaccagtcactacgtttttaaaaaagacaagacttggtccttaagttcaaggtctaggaggcaatgttaatctcctttaagtaaccatccctttattatctggaccttgaaaatcatctgagagatgcaggtgaaggccaaggagtcaattaaaagaagcctttggttagatctccaatatgttgtaggcagaaggttggggatcagtttaaatgaagcctgaagaactgtggaatcttgcttgtcttgagtgggaaaatctacttcttgtcattttctggaaaccagtggaaccagattccaggttgagctgcctcatgggctaatgtgttagcgctctgcagtgccagggatatatactaatatgcctggacctgagaatatgctcttcaggttccttagtagcacacgacgtaccagaatctataccaagattctttaggcaaactaacctgggccattgttccacccaaccaaggaattacgtgcccctgactcttaatagtctattttcatttagatcctccaagaaggtctagcttgtccctcttgtacccatccacccccggcaaaagcttctatattcacctggtagccccagggatgacagggtcctctattctggagactgttattgctactgctgctaattccacgagctgtgaagatccccaactcagctgcaaaatatgcaattctgtggtgggaagaggctgactgtccgaggatggtgctgaaatcactgccttaaggtctctgctgtgcagaatgagaaggcccccccagagctgggtgttccaacttagaaggaagggaagactggataggcctactttggacataggtctcttctgaaccctatccaaagctccagtacatggcaaggctcagacttttgctaacatcctaatgcttgagcctttcaccctctttttctggtgctgcccagccagtgccttctgacacggatgttactggctacttaagaagaaggaaagtaggaaatgccttcttccattccaactgcctcagactacagagagagtgtctctgtggtaactatggataccatcgagaattttatttgggtctgcagcaagttgattctggaggcctcgcatactttgacttcatttctattcctgggatccaccaccctcttctctcagttgactgctgcatttagttcaggcctcaaatagctgtcctccaggaagtgcgttcccatctagtgaagtgctctcgaagcctacactttccttctggagcctgggaccctgtttacagttgcacatctgggc

SEQ ID NO: 132 - DNA, 3211 bp, Mus musculus
ggcggagggccggccgggcgggactgaggccggaggctgggaggccggggcggcgggcgcgcggctcggcgggaggcgggcgcccggagacgcggctggggccagcgcggccggggcgccgtcccagggctgggttgcccggccccggccccggccccgggatccccatgaaaaaccagctccgcgggcccccagtgcgggcgcacatgtcgacttcgggggcggcggcggcggcggcggctgggggcactcgggcggggtcggagcccggtgcgggatctgggtccggcgcaggcatcggagcgggagcgacgacgggagcgggggccatgccctgcaagagcgccgagtggctgcaggaggagctggaggcgcgcggtggcgcgtccctgctgctgctagattgccggccgcacgagctcttcgaatcgtcgcacattgagacggccatcaacctggccatcccgggtctcatgctgcgccgcctgcgcaaaggcaacctgcccatccgctccatcattcccaaccatgccgacaaggagcgcttcgccacgcgctgcaaggcggccaccgtgctgctctacgacgaggccacggcggagtggcagcccgagcccggcgcccccgcctccgttctcggcctgctcctgcagaagctgcgagacgacggctgccaggcctactacctccaaggtggtttcaacaagttccagacggaatactccgagcattgtgagactaacgtggacagctcgtcctccccgagtggctcgccacccacctccgtgctgggcctggggggcctgcgcatcagctctgactgctcagacggcgagtcggaccgagagctgcccagcagtgccactgagtcggatggcagccctgtatcatccagccagccggcctttccagtccagatcctgccctacctctacctcggctgtgccaaggactctaccaacctggatgtacttggcaaatacggcatcaaatacatcctcaacgtcacacccaacctgcccaacgcctttgagcacggtggtgagttcacctacaagcaaatccccatctctgaccactggagccagaacctctctcagttcttccccgaggccatcagcttcattgatgaagcccgctccaagaagtgtggtgtcttggtgcactgcctagcaggcatcagccgttcagtgacagttactgtagcctacctgatgcagaagatgaacctgtccctcaacgacgcctatgacttcgtcaagaggaaaaagtctaacatctcgcccaacttcaacttcatggggcagctgctggactttgagcggacgctggggctcagcagcccatgcgacaaccacgcacccagtgagcagctctacttctccacgcccaccaaccataacctgttcccgatcaacacgctcgagtccacgtgaggcctggggcactgatgggcgcagcaccagggtctcccagccctccacggggcctggtgggggccctagcctgctgcccctctggcctgaagaacccacagatgtcacctgtgtccagagaaccaggctgagcagtggctgagctcccatgccatcctgtgcagggtcctgtggcagcacttgccagatggcctcagctctccagacatgttgctaagcgagcgttggcctcagctttcagacttgcggcttgggggctggtggggccttgcctctgccccaggacatccattcggctgatagcccagccattctggctatttttaaagacatatccacagacctgaggttgctacttttggcaggtaaatccgagctcgctggagcagagttcaagctcttcttggtttgtttttttcttttcttgtcttttcttttcttttcttttcttttcttttctttctttctctttttttttttaacaaagtgttatttttcaggctaaatgcaacaatggattgtataaaccaatatttcaccccctttcctaagacagagagagagagagagtgttctcagtttcttgtttcaaaaagcaaaccatcgatgtattttgttttcaatggaaaagacaaaccccatgttcttgaccaaatgcattttgcacgtgtgtgaagtctgatttcccagcaggccattctggaagggtgggttgtcactctctgggcatcaggaccctggttctaccatttcctacctgtgacccagcccacctcagtgccgccttggcacagtcccgtcgctaggagctgcgcctggtgggcactggtggtctttgtgttgtctgccctcctaccaaccttctgagagtcctgcagacctccctgccaggtcctactggaggtggtgctgcaggggagtggcaagcagtagcattagccatctgggctccgcccctgagagggctgcgccctggccctttcataaactgcccaccacttctgtcctcatctctgtctctgaactgggaatagaggcccacagtgcctgtgtaaagccttcccagtcccttagctttgctgtagactccaacgaggttcacccccagcccccttgtccaggtgcacacctgccctggcccatgttgcccgtgcctttaacctgcaggcaacctacacctattgcggcccaagagctggggcaggtggggcaaggactggctagtggggggtaagaggcccccatcccaggatccatagcacaaagccacgggctccataatactcctccggtttcatcgcttctcagccttgcttctccctaggcaccatgaggaacaggaagtgctggggtcctgatgggacgcacacccgcagggggcagtgactgaggccacatcttacctcacagggctggttttcagggattctttagggaagcagtttaaaatcttgccacagttgagaaattggcaaaaaaaaaaaccaaaaacaaaaaacaaaacttccattctgtacatggcatgtttctctctctctctctccctccctcccttacccccccccttctcattttttaaaagaaaacccagaaacatggatcagagtgtaaatgagggtataccagagggtggccagttttgctttaagatcttatgaaggaaagtttgtgaccctacatacatacatatatatatagacacgcacacacacatatatatcccgagccagcaacgggacgttgtttatattgcaaataaatattattttttcttt

SEQ ID NO: 133 - DNA, 1306 bp, Mus musculus
tttttaaaagtggagcctcaggccagcccctagccgcagcgtgtctcagtcggttgtcgagtcccttctgtcccagtcgttcgtgcctcttgtcccacgcaactccagcttgtaccatgccggtcaaaggaggtagcaagtgcatcaaatacctgctcttcggatttaacttcatcttctggctcgctggcattgcagtgcttgctattggactatggctccgattcgactctcagaccaagagcatcttcgagcaagagaataaccattccagtttctacacaggagtgtacattctgattggagccggggccctcatgatgctggttggtttcctgggctgctgtggagctgtacaagagtcccagtgcatgctgggattgttcttcgggttcctcttggtgatattcgccattgagatagccgccgccgtctggggctatacccacaaggatgaggtgattaaagaactccaggagttttacaaggacacctaccaaaagttacggagcaaggatgaaccccagcgggaaacactcaaagccatccatatggcgttggactgctgtggcatagctggtcctttggagcagtttatctcggacacctgccccaagaaacagcttttggaaagtttccaggttaagccctgccctgaagccatcagtgaggtcttcaacaacaagttccacatcattggagcagtgggtatcggcatcgccgtggtgatgatcttcggcatgatcttcagcatgatcctgtgctgcgccatccgcaggagccgagaaatggtctagagtctgcccaaccccgagcaggaacaacggccctgaagactgtccgggccatttgggttttttttgccactaatattagtattcattatgcatttctaaataacagtcattctgtttgtctttttaatgctttattcattattgacatttgtagttgagggatccgggggttcaatttattttgatttttttttttggttgtttatttttgcttgttatgttaagcaaaaatcctgcaatgaaaggtactatatttgccagactctagacataagatattgtacataaagagaattttttttgcctttaaatagataaaagtatctatcagataaaaatcaggttgtaagttatattgaagacaatttgatacataataaaagattataacagtgaaaaaaaaaaaaaaaaaaaaaaaaaaaaaaaaaaaaaaaaaaaaaaaaaaaaaaaaaaaaaaaaaaaaaaaaaaaaaaaaaaaaaaaaaaaaaaaaaaaaaaaaaaaaaaaaaa

SEQ ID NO: 134 - DNA, 3160 bp, Mus musculus
cccgaggccagcaaacagcgccctacgccggcaaagccacgccacattgtcgcctgcacagccctcagggagcagaagagtcaccatgccggccccacgcgcggccgcggccgccttcctcctgctgcacctggtcctgcagccgtggcagcggacgagcgcccaggccacaccccaggtctttgatcttctaccgtcctccagccagaggctgaaccccagcgccctgcagccagtcctgacagatcccaccctgcacgaagtctatctcatctccaccttcaagctgcagagtaaaagctcagccaccatctttggcctctactcctcaagtgacaacagcaaatactttgaattcactgtgatgggacggctgaacaaagccatcctccgctacctgaagaatgatggaaagatccatctggtggtgttcaacaacttgcagctggctgatgggaggcgccacagggttctcctgagactgagcaatttgcagagaggagatggctctgtagaactctacctggactgcgctcaggcggactcggtgcgcaacctccccagagccttttctggcctcacccagaacccagagtccattgaattgcggacattccagaggaagccccaggacttcttggaagagctgaagctggtggtgcggggctcgctgttccaggtggccagcctccaagactgcttcctgcagcagagtgagcctctggctgccacaagcacaggagactttaatcgacagttcttgggtcaaatgacacaactgaaccagctccttggagaggtgaaagatcttctgaggcagcaggtcaaggaaacatcgtttttgcgaaacaccattgctgaatgccaagcttgtggtcctctcagctttcagtccccaactccaaacacactggtgcccatagctcctccagcacccccaactcgcccaacacgccactgtgactccagcccttgtttccgaggtgtccgatgtacggacaccagggatggcttccagtgtggaccctgcccagatggttacacgggaaacgggatcacctgctctgacgtggatgagtgcaaataccatccctgctatccaggtgtgcgctgtgtgaatttggctccgggtttcagatgtgacgcctgtccagtaggtttcacagggcccatggtgcagggtgtcgggatcaactttgctaaaacaaacaagcaggtgtgcactgatgttgatgagtgtcagaatggagcgtgtgttctgaattctatctgcattaacactttgggatcttatcgctgtgggccttgcaaaccagggtacactggtgatcagacgaggggatgcaagactgaaaggagctgccggaacccagagcagaacccatgcagtgtgcatgcgcagtgcattgaggagcggcaaggggatgtgacgtgtgtgtgtggtgttggctgggctggtgacggctatgtctgtggaaaggatgtggacattgacagttaccctgatgaagaactgccatgctctgccaggaactgcaagaaggataactgcaagtatgtgccaaactctggccaggaagatgcagacagagatggcatcggagacgcgtgtgatgaggatgcagatggagatgggatcttgaatgaacaggacaactgtgtcctgactcacaatatagaccaaaggaacagtgataaagatatctttggggatgcctgtgacaactgccggatggtcctgaataatgaccagaaggatactgacggggatgggagaggagacgcctgtgatgacgacatggatggagatggaataaaaaacattttggacaactgtcccagagttcccaaccgtgaccagcaggatcgggatggtgatgatgtcggagacgcttgtgacagctgtcctgatgtcagtaaccctaaccagtcggatgtggataacgatctggttggggactcctgtgacaccaaccaagacagtgacggggatggccaccaggacagcacagacaactgccccacagtcattaacagctcccagctggacactgacaaagatgggatcggcgatgaatgtgatgacgatgacgataacgatggcatcccagacctggtgcctcctggcccagacaactgcaggctcgtccccaacccagcccaggaagatagcaacaatgacggggtaggagatatctgtgaagctgacttcgaccaggaccaggtcatcgatcacattgatgtgtgccctgagaatgcggagatcaccctgactgacttcagggcctaccagacagtggtcctggaccctgaaggggatgctcagatcgaccccaactgggtggtcctgaaccagggcatggaaattgtgcagaccatgaacagtgaccctggcctagctgttgggtacacggcatttaacggagttgactttgaagggaccttccacgtaaacacccagacagatgatgactatgctggctttatttttggttaccaagacagctccagcttctatgtagtcatgtggaagcaaacggagcagacatactggcaggctacaccgttccgtgcagtagcagaacctggtattcagctcaaggctgtgaagtctaaaactggcccaggggaacatctccgaaactccctgtggcacacaggggacaccagcgaccaggtcaggctgctgtggaaggactccaggaatgtgggctggaaggacaaggtctcctaccgctggttcctgcagcataggccccaggtgggctacatcagggtgcgcttttatgaaggctcggagttggtggctgactctggggtcaccatagacaccaccatgcgtggaggccgacttggtgtgttctgcttctctcaagaaaacatcatctggtccaacctcaagtaccgctgcaacgacaccataccagaggacttccaggagttccagacccagagttttgaccgcttggataattgagccaagaagcaatcccacaactgccttctcaaacaccaaagcaacatcttttttaaaacttcctataattctctttatattatcatggcttttcttttaccagcccaaatacgtcaaaactttttatatgaatgtggaaataaagaagagactatttctaataagaaaaaaaaaaaaaaaaaa

SEQ ID NO: 135 - DNA, 858 bp, Mus musculus
gcagttccaggacaccctgttaccatgtggttcctgatcctgttcctagccctgtccctaggagggattgatgctgcacctcctctccagtctcgggtggttggaggatttaactgtaagaagaattcccaaccctggcaggtggctgtgtactaccaaaaggaacacatttgtgggggtgtcctgttggaccgcaactgggttctcacagctgcccactgctatgtcgaccagtatgaggtttggctgggcaaaaacaagttattccaagaggaaccctctgctcagcaccgattggtcagcaaaagcttccctcaccctggcttcaacatgagcctcctgatgcttcaaacaatacctcctggggctgacttcagcaatgacctgatgctgctccgcctcagcaagcctgctgacatcacagatgttgtgaagcccatcgccctgcccacaaaggagcccaagccggggagcaaatgcctagcctcaggctggggcagcattacacccacaagatggcaaaagccagatgatcttcagtgtgtgttcatcacgctcctgcccaatgagaactgtgccaaagtctacctacagaaagtcacagatgtcatgctgtgtgcaggagagatgggtggaggcaaagacacttgtagggatgactccggaggcccactgatttgtgatggtattctccaaggaaccacatcatatggccctgtaccatgcggtaaacctggtgtaccagccatctacaccaaccttattaagttcaactcctggataaaagatactatgatgaaaaatgcctgagtgtcacattgtcccatgttcttaataaagcccaccatgaagcaaatg

SEQ ID NO: 136 - DNA, 4933 bp, Mus musculus
ctctagccagcgcactcggagcccagccggcggacgcggtgtgggtgcactgaacgcacggtcggctgagcggcgcgggatccccggcagcaactgtggcacaagccccgcatcggatctgacccgcgttccccaggcggcggccagcgagcagcacgcggagacggagtggccgagcggttgccgggcgagctggaaaccatggccaaaatggaggtgaaatcctcacttctggacaatatgatcggtgttggagatatggttcttttagagccgctcaatgaggagacgttcatcgacaacctgaagaagcgcttcgaccacaatgagatatatacatacattgggagcgtggttatatctgttaacccctaccggtccttgcccatatattcgccggagaaagtggaagattacagaaatagaaacttctatgaactgagccctcacatctttgctttgtcggatgaagcatacagatccctccgtgatcaagataaagatcaatgcattctcattactggggagagtggagcaggaaaaacagaggccagcaagctcgtcatgtcctatgtcgctgccgtgtgcggaaaaggagcagaagtcaatcaggtcaaggaacagcttctgcagtccaaccctgtcctggaagcttttggaaatgccaagactgtgaggaatgacaactcatctagattcggcaaatacatggatattgaatttgactttaaaggcgatccgctgggaggagtgataagtaactatcttttagagaaatctcgtgttgttaagcagccaagaggtgaaagaaacttccatgtgttctatcagctgctctcaggcgcctctgaggagctcctctacaagcttaagctggagcgggatttcagcagatacaactatctgagtctggactctgctaaagttaatggtgtggatgatgctgccaatttcagaactgttaggaatgcgatgcagatcgtgggctttctggatcatgaggccgaggctgtcctggaggtagtggcagccgttttgaaactggggaacatcgagttcaagcctgaatcacgagtgaatggtttggatgaaagcaaaatcaaagataaaaatgagttaaaagaaatttgcgagttgaccagcatcgatcaggtggttttagaaagagcgttcagtttccgaacagttgaagcgaagcaggagaaagtttcaaccacgctgaatgtggctcaggcttattatgcccgtgatgccctggctaaaaacctctacagccgcttgttttcatggttggtaaatcgtatcaacgaaagcattaaggcacaaacaaaagtgagaaagaaggtcatgggtgttctggacatttatggctttgaaatatttgaggataacagcttcgagcagtttattattaactattgtaatgaaaagcttcaacaaatcttcatcgaacttaccctcaaagaagagcaagaggaatatattcgggaggacatagaatggactcacattgactacttcaacaatgctatcatttgtgacctaatagaaaataacacaaatggaatcttggccatgctggatgaagagtgcctgagacccggcactgttacagatgagaccttcctggaaaagctgaaccaagtctgtgccacccaccagcactttgagagcaggatgagcaagtgttcccgctttctcaacgacacaaccctgccccacagctgcttcagaatccagcattatgctggcaaggtgctctaccaggtggaaggatttgttgacaagaacaatgaccttctgtaccgggacctgtctcaagccatgtggaaggccggccactccctcatcaagtctctgtttcctgaaggaaatcctgcaaaggtcaacctgaagagacctcccaccgcaggctcccagttcaaggcgtctgtggccacgctgatgagaaacctgcagaccaagaacccgaactacatcaggtgcatcaagccaaatgataaaaaggcagctcacattttcaatgagagtctcgtatgccatcagatcaggtacctgggtcttttggagaacgttcgagtgagacgggcaggctatgccttcaggcaggcctatgaaccttgcctggaaagatacaagatgctttgcaaacaaacgtggcctcactggaagggaccagcaaggtctggcgtggaggttctgtttaatgagctagagattcctgtggaagagcactccttcgggagatccaagatattcatccgaaacccacggacattattccaactagaagacctaaggaagcagcggctggaggacctggccactctcattcagaagatttatcgaggatggaaatgccgtacacattttctgctcatgaaaagaagccaagttgtgattgctgcctggtacaggagatatgcgcaacaaaagcggtaccagcagataaagagttcagccctggtgattcagtcgtacatccggggctggaaggctcgaaaaatcctgcgggagctgaagcatcagaagcgctgtaaggaggcagccaccaccatcgcggcgtactggcatggcacccaggcacggagggagttgaaacgcttgaaggaggaggctaggcgtaagcatgcagttgctgtcatttgggcttactggcttggactgaaggtacgcagggaatacaggaaattctttagagcaaatgctggaaagaaaatctatgagtttacacttcaaagaattgtgcaaaaatacttgttggaaatgaaaaataaaatgccttccttgtcaccgatagataaaaattggccatcaagaccttacctgttcttggattcgactcacaaggagctaaaaaggatcttccacttgtggaggtgtaaaaaatacagggatcaattcacagaccagcagaaacttatttatgaagagaagctcgaggccagcgaactcttcaaagacaagaaggctttatatccttctagtgttgggcaaccattccaaggagcttacctggaaatcaacaagaacccaaaatataagaaactcaaagatgccattgaagagaagatcattattgctgaggttgtgaacaaaattaatcgggctaatgggaagagtacatctcggattttcctcttaacaaacaataaccttctccttgctgaccaaaagtctgggcagatcaagtccgaggtccccctggtagatgtgaccaaggtttccatgagttcccagaacgatggtttctttgcagtgcacctcaaggagggttcagaagcggctagtaaaggggactttctcttcagcagtgaccacctgattgaaatggcaaccaagctgtatcgcacgactctcagccaaactaaacagaagctcaacatcgagatttccgatgagttcctggtacagttcagacaggacaaagtatgtgtgaagtttattcaaggcaaccagaaaaatgggagcgtgccaacctgcaaacgaaagaacaacagactccttgaagtcgctgtcccttaagtgaggcttcctctctgctctcacggacttgtttcctcgtaacagtgcaattttactttgttttatttggggttcactgtatgtttgggaattgccaaaggctaactgttagcgtcctcttggcacaattaaaagtatttgactaatgagttttaattatcagaatagttcattcctaagtccacattctgtcctgggcagaattctagaaattaacagtgtctgtctccatggtttatgtgttttctccttagttacctagacttgtgtaccctaaacccacatattacccataaatcactagtacatgtcagcacaggaggggagcttacagtcagttatcagatatttattgaatgcctactttttgctgggccctgtgctgaacttattcggagatttctatttttaaagctgttgccttctggctgatttgtgctgtggaagcaacagctaagaaagttgaagagattgggtcaaatgagactataaatgacggccactggtaggaacccagtagtgtggcgtaaacagtacactcactgagaagtagaggtcctgggtggattggagataggtaattgggtagaattctcctgagaggtttggagatagatgattgggtggaattcctctgtgtttgtttgtttgtttgtttttcataaatctatttgaaaaagagataaccaacatttaaacatacacatttattggttcagatccgttttcactttagaaaaagtcactgaagcagggctgtagaatgctttgttcctgttccagagaagcatgagataggaccctggatgtgcacagtgtatccacccagggtcattagcttttgaaactgcatgataagaagaggctgagagccgttcagactggcagatcttctctttgatgtgcaataaaacatccaagatcacttttgaaagttttatttataatatgcattttttttgtatgagagagctgattggtacaaggtgtgtattttagtcagatcaaaattaagttagaattcgttttcagggctttttgattttttttcttcaaaattaacaataaggattcattttggaaaccacattttaaactctggaattaaattgtttcttatttgggaggataatgtaaatacattgggattatgttaataataaaattgttctaatttggtgccatttgctggattacaactgtatttttgtatctcaagctattttcatacgttagtgtcaaagtgatgtgtcacagaaaggatttccattcagatattatatggtctctgtgttaacagatttccactgatctttttgtaccactatcagtcaatgaaaaagttctctggggattttcttttgatttttgtacttaaaaagaaaaaaaaaaagttctgataaagaaa

SEQ ID NO: 137 - DNA, 4158 bp, Mus musculus
ggtgtgttgaggggcgtggactctccccgggctgcgcttaaatagtgaaggccagagagaccagggaagaggaagccaggacagacccgccagcaccccagccaacccaacgttgccatgaggctcctgagcgtgactttttggctactcctgtccctgcgcactgtcgtctgtgtgatggaggtgcagtggtgtaccatctcagacgcagagcagcagaagtgcaaagacatgagcgaggccttccagggagctggcattcgtccttcccttctctgcgtccagggcaactccgctgaccactgtgtccagctcatcaaggaacaaaaagcagatgccatcaccctggatggaggggccatctatgaggcagggaaggagcacggcctgaagccagtggtgggggaagtctatgaccaagacattgggacttcctattatgccgtggctgtggtcaggaggaattccaatgttaccatcaacaccctgaagggcgtcaagtcctgccacacaggcattaaccggactgtgggctggaacgtgcctgtcggttacctcgtagagagcggccatctgtcagtgatgggctgtgatgtgctcaaagccgttggtgattattttggaggcagctgtgtccctggaacaggagaaaccagccattccgagtccctctgtcgcctctgccgtggcgactcttctgggcacaatgtgtgtgacaagagtcccctagagagatactacgactacagtggagccttccggtgcctggcggaaggagccggtgacgtggccttcgtgaagcacagcacagtgctggaaaatactgatggaaacaccctgccttcctggggcaagtccctgatgtcagaggacttccagctactatgcagggatggcagccgagccgacatcactgagtggagacgttgccacctggccaaggtgcctgctcatgctgtggtggtcaggggtgacatggatggcggtctcatattccaactgctcaacgaaggccagcttctgttcagccacgaagacagcagcttccagatgttcagctccaaagcctacagccagaagaacttgctgttcaaagactccaccttggagcttgtgcccattgccacacagaactacgaggcctggctgggccaggaatacctgcaggccatgaaggggctcctctgtgatcccaaccggctgccccactacctgcgctggtgtgtgctgtcagcgcccgagatccagaagtgtggagatatggctgtggccttcagccgccagaatctcaagccggaaattcagtgtgtgtcggccgagtcccctgagcactgcatggagcagatccaggctgggcacactgacgctgtgactctgaggggcgaggacatttacagggcaggaaaggtgtacggcctggttccggcggccggggagctgtatgctgaggaggacaggagcaattcctactttgtggtggctgtggcaagaagggacagctcctactccttcaccctggacgagcttcgcggcaagcgttcctgccacccctacttgggcagcccagcgggctgggaggtgcccatcggctccctcatccagcggggcttcatccggcccaaggactgtgatgtcctcacagcggtgagccagttcttcaatgccagctgcgtgcctgtcaacaaccctaagaactacccttccgcactatgtgcgctctgcgtgggagacgagaagggccgcaacaaatgtgtggggagcagccaggagagatactacggctacagcggggccttcaggtgccttgtggagcatgcaggggacgtggctttcgtcaagcacacgactgtctttgagaacacaaatggtcacaatcctgagccttgggcttctcacctcaggtggcaagactatgaactactgtgccccaatggggcacgggctgaggtagaccagttccaagcttgcaacctggcacaaatgccatcccacgctgtcatggtccgtccagacaccaacatcttcactgtgtatggacttctggacaaggcccaggacctgtttggagacgaccataacaagaacggtttccaaatgtttgactcctccaaatatcacagccaagacctgcttttcaaagatgctacagtccgagcggtgccagtccgggagaaaaccacatacctggactggctgggtcctgactatgtggttgcgctggaggggatgttgtctcagcagtgctccggtgcaggggccgcggtgcagcgagtccccctgctggccctgctcctgctgaccctggctgcaggcctccttcctcgcgttctctgaagaccgctgcttcaggccacgcccagagcagggaaagctacagagctcaaccggaagaaaccaggacatcagctaaccctgcaggagagcgcggggcgggatgaggagaggcaaggtgagaactcacacacacacacaagcctccgaggtgcgattctaacccaaagagaaatttctagaatcaggatgattgttaaggccaagtcttcccacttgctggagccctcaatacctgaggcgactggcgagtagcccagtcactcctcccacaccggtggcgccagcagcgaacctgtgcctcccacctggagcctcctggctggctggggtggttaagggggggggggggagagtgaagatgctggttgccatggcaaccgtggagcagcttccagcctctgtaccggccacctggtgagatgccaaggaaggagcacaccaccaacctagggaacctgtgcgacacactaccacccagcagcccctgctctcgctgccccaccgctctctcctatgggcacttgtccaccaaggccacaccgtcggaggggcaaggctgctgagcacatcagccttctgatgtgacaccaaccaaggagcccagccctctggacagcaagattttgctagactgggatgggaggaaggccagagctgtactgtggggatgaagtcctccaaaaccctcagaggaaggaagtgcccccaccttcccattaagaatgttagtgtgtgagaaacttgatgcagggtggaaactatcctgtttaacggctcccgtggcaagcaggacttgcgctgtctgcgctgcctggacctcactgcacaatgaaactgttgccgagattctattgtttgctctcctggtctcagtctcaacattagttttctccctgccttcatataccccttcccacatcaccacgcaagcacgcacgcgcacacgcacacgcacacaccttatccgtgtgaacatatctgaacatatctgcttgtctgaagaagtaggagctaacccaaaataacttcctgtcatgagctgggccttgggatataccacgagccaggggattggggagagccctgtcttcccttcaccctgcacctgttgggcagttgcatctttcgagaggatccctggttctctcgaactgtgagagccaaggcctaggctgccattttgccattgttctctcgagaaccagaaaaagttttccaaagctaccagctcttaccccagatcttgttcccttaaaaaaaagtaataaataaaaaggagaagaaacaggagcaaacagccatcgtcagcacactggaagcagcgtgggccgggagctatttgtgtcttggtctgtgtggggggcctcagatcccaatgacaggccaggttcccagtggctcgcccccacctgtgggcgacgacgggacagatcctttccatggctcaccagtagagaaggtcctggcagtgtcccagccagagtcacacaatcctgaggaaaatcggtcaccatggtgcttgggagagcaagcccctcctcctcccagtacacagccatccattcttctctgagctggggacttcacagtgagaagtgtactctgtgtgggcgactgtgctgcccaaagtgtgatgtctgtgccgtgtgcctttcaggtgtgactttgaagagcgttgtgtaaatgacgtctgattgccatgggccactgctgtgtttgtgctaaagaaagacattggtttctttttaaaataaagccatatatccctgcatacgcagaggcttggatcctggtggaaaaaaaaaaaaaaaaaaaaaaaaaaaa

SEQ ID NO: 138 - DNA, 11096 bp, Mus musculus
ggggcgcgtcgacggtggcgccgtgcttgggttaccgagctgacgtggcttcgattgggcggggggcgtccggagttggctgggacggccgcctgcagcatgtttgtacaccaagtgcatgcagtgcccgaagaggtcagaagagggcatcagatcccctaggcctggagctacagacagttgtgagcatccacatggtttctgagaagtgaattctgggccctctggaagagcgactggcgttcttaacctctgaccaactctgaagaccccactcagagatgctgagccgattatcggggttagcaaataatgttttgcatgaattatcaggagattacactgactggaatttgatggcttcctcagacgctgactcatcccaggaaactgccatggaatcgaataatagaataatggaatccacgcaagaggatgctctgcaccgcctggctgaggcagagaagttagtggtggagctgaaggatattattagtcagaaggatgttcaactccagcagaaggacgaagctctgcaggaggaaaaaaaagctgctgaaaacaaaattaaaaaaataaaactccatgcaaaggccaagatcatgtccttgaacaaacacatggaagaaataaagacacaaggaggggctgctctgcctccagaagcccaggcagaggagctctccaagcataataagagttcaacagaagaagagatggaaatagaaaaaataaaacatgaactccaggaaaaggagaaattaattagtagtttgcaagcccagcttgaccaatcagaacaagcctcgcagagttctgcagagatggaagactttgtcctgatgaagcagcagctccaagaaaaggaagaactcatcagcactttgcaaacacagctcagccagacacaggcagagcaagctgcccagcaggtggtccgagagaaagacgcccgctttgaaacacaggttcgtctccatgaagatgagctccttcagttagtaacccagtcagatgtggaaacagagatgcaacagaaattgagggtgatgcagaggaagctggaggagcacgaagaagccttgctgggccgtgcccaggttgtagacctgctgcagaaggagctaacgtctgcagagcagagaaaccaggttctttcacagcagctacagctgttggaggctgaacataatactttaaagaataccatggaaacagaaagacaggagtccaagaccctgatggaaaaggtagaactcgaagtggcagagagaaagttatccttccataaccttcaagaagagatgcatcagcttcagggacagctggagcgagcaggccaagcccaggctgacctggagacacagtacagtgctctccagcaaagacataagacagagatggaggagaagacggcttgcattttgagtcttcagaagaacgagcaagagctgcagtctgcctgtgctgctctgaaggaggagaactcgaagctgcttcaggagaagcacgaccaggctgctgagtcagcccaggccatgcggcagctggaagatcaactccagcaaaaatctaaagaaattagccaatttgtaaataagccaaacttgcaaaaaaatgaaacagcatctcagacttctttaccagatgttaataatgagggcgaccaggcagtgatggaggagactgtggcctctttacagaagagagtggtagagctagagaacgagaagggagccttgctccttagctctggagagctggaggagctgaaagccgagaacgaaaaactctcctctcggattactcttttggaagctcagaatagagcaggggaggctgatggtacggtctgtgaggtcagcacggctggtactactctgctcaacaggagtgactcttctcctgaagaaaatgggcaggctgttctagagaacacattttctcagaaacataaagagctatcagttttattagtggaaatgaaagaagcccaggaggaaattgcatttctcaagtcacagctgcagggcaagaggcccgagggggactatgaggtcctcgaccgtagagaagtgcagctgatggagagtgaaggaccgccctcagttacagcaggagatgtcctctgtgcacccagtgatgagagcagcggcccagcagctgaagaggaacaggcaggcatgaaagatcggcatcgagcatctgaggcaggacctctaaatgatgctggaatggaactgagctccccgaagctggatggcgtggacaaatccctcgcagtgtcccatgtctgtcagtgtcaccagggcgaactggaaaggctgaaaactcaagttttggagcttgagacaagccttcatacagcagaggaaacttacaagagaaacttaagtgagaaagtgaaggaaattagcagcctaacccagcttagcgaagaggtcaaagagagcgccgaggaagcccgcagcacgctcgccgcagtgacggaagaaagagaccagctgctttaccaggtgaaggagcttgatgtcttagcagaactgcgggctcgggtccaagaactggaaagcagccttgcagaagcagaaaagcaaagaggtctggactatgaaagccagagggctcagcacaacctgctcacggagcagatccatagcctaagcatagaagccaaatctaaagatgtgaaaatcgaggctttacagagagagctggatggtgtgcagctgcagttttgtgaacagggaacccagatgaaaacccttcagagccagctagaggcaaaggagagggaagtgcgagaggggacagagcgtctgagggacatctcacaggagatggaaggactgtcgcaggctctttctcagaaagaactggagatagccaagatggaccaactcttgttagagaaacagaaagatgtggagacactccagcaaaccatccaggagaaggatcagcaagtgacagaactcagcttcagtatgacggagaaaatggttcagcttaacgaagagaaattttctcttggggtggaaattaagactctgaaggagcagctcaatttattgtccagaactgaagaagcaacaaaagagcaggtagaagagagtggagctgggtccagccttaaacttggtcacgatgagtcaggtcaagaggggcttcagcaggagctggagttgctgcggaaagaaagtgagcagagaaagcggaaactgcaggcagcgctgatcaacagaaaggagctactgcagaaagtcagccagctggaggaggagctagccaaggtgagagaggactctcggaaagagattcccttcggggagaatgagaggagaaagctggaggaagacagagagaacagagatgacccagaagaatgggggacttctaagtggcgagaagtagaagcttccttaaaacagacaatatctgaaaaagaagtggagctggagggcatacggagggatttaaaagaaaagacagcggcagaggaagagttacaggctgtggtccagcggatgactcgggacctgcagagtaagacaaagcagatagatttgcttcaagaagaagtcactgaaaaccaagcaactattcagaaattagtcacaggaaccatggatgccgggaatggaggctcagcagcacctgtaaaagaaacagcggcgagcagcccacccggtgcaggtggtgaggagcactggaagccagagctggagggaagaatactagaccttgaaaaagacaagacacaacttcaaaagaagcttcaagaagccttaattgcccgcaaggcgattctgaaaaaggcacaagagaaagagaaacagctaaaggaagagctcagggagcagaaggacgcgtaccatcacctacagggacagttccatgagcagaataaggagaaggagaacattgcggaccagctaaggcaactccagtgccaagcaagggagtccatagacagacagctcccaggcactggccagcaggaacctggtcctcccgctccaagtttagaaggcatttccctagaagacacagagcctgcttcagaatctgacttacacgcagctcagccttctcctcccggagagacagcagctctccaggctactgtttctgttgcccagattcaggctcagttgaaagaaatggaggttgagaaggaagagctggaattgaaagttagttctatagcaagtgagctggccaaaaagtcagaagaagtacttctcttacaagaccagataaatgaacagggtttagaaatccagaatttgaaggcagcatccgttgaagcccaggcccacacagaactgctgaagcaggagttggaaagcagccagttgaaagttgctggcctggaacatctgaaaacgttacagcctgaactcgatgcactgcacaagcacatgggccagaaggaagaagaggtcaactacctttatggacagcttagtgagaaagagcagaccctcaccacggtccagacagaaatggtggagcaggagcgtttaatcaaggctctgcacacccagctggaaatgcaagccaaggagcatgaagagaggctaaagcaggcccaggtggaaatttgtgagctgaagaagaagccaacagagcttgaggaagaaactaatgcaaagcaacagttacagaggaaattgcaggctgcgctcatctcccggaaggaggcactcaaagaaaacaagagcctgcaagagcagttgtcctcagccagagatgctgttgaacgcctgaccaagtctctggcagatgtagaaagccaggtttctgtccagaatcaagagaaagatgcagtcctaggaaagttaaccattcttcaggaagaaagagacaagctcattgcagaaatggacaggtttttactggaaaaccagagcctcagtggctcttgcgaaagcctgaaactagctctggggggcctcacggaagacaaggaaaagctgatggaggagctggaatccgtgagaagttctaagatggcagagagcaccgaatggcaagagaaacacaaggagctgcagaaggagtacgaggttcttctgcagtcgtacgagaacgtgagcaacgaagccgagaggattcagcacgtggtggaaagtgtgcggcaagagaagcaagagctgtacgcaaagttaaggagcacagagtcggacaagagagagagagagaagcagctgcaggatgcagagcaggaaatggaagagatgaaagagaagatgcgaaagtttgcaaaatctaagcaacagaagatccttgagctagaggaagaaaatgaccggcttagagcggaggcgcagcctgtaggaggaaccggtgagagcatggaagcacttctttcttccaactccagcttgaaggaggaactagaaaagatcacattggagcataaaaccctttctaaggagtttgaggctttaatggcggagaaggacgctctgagtgaagagactcgaaatctaaagcttcaggtagaagcccaagtactgaaacaagctagcctggaggccactgagaaatctgatgagccaaaggatgtcattgaagaggtaacacaagctgtggtgggcaagtctcaagaacgagatgctctgagtgacagtgccaagcttgaagattcggaagctattctgatgggcgacggcgccaagccgggtgttagtgagactttcagctcccacgatgacatcaagaactacctccagcagctcgatcagcttaaaggaagaattgctgagttagagatggagaaacagaaagacagggaactcagccaggctttagaaaatgagaaaaatgccctactgactcagatctctgcaaaggatagcgagctaaagctcctggaggaagaagtcaccaaaagaaccacgctaaatcagcagatccaagaagaactctgcagagttaccaagctgaaggagacggcagaagaggagaaagacgatttagaggagaggctgatgaatcaactggcagaacttaatgggagcatcgggaattattaccaggatgttacagatgcccaaataaaaaacgagcaactagagtcggaaatgcggaaccttcaaagatgtgtgagtgaattagaggaagaaaagcagcagctggtcaaggaaaaaaccaaggtggagtcagaaatccgaaaagagtacatggagaagatccaaggtgcccagaaagggccggccaataaaagccatgcgaaggagctccaggagctgctgcgggaaaagcagcaagaagtgaagcaactgcagaaggactgcatccggtacctcgagaggatcagcgccctggagaagaccgtcaaggccctcgagttcgttcacaccgagtcccagaaggatttggatgtgaccaaaggaaatctggcccaggcagttgaacaccgcaagaaggcacaagctgaattatctagcttcaagatactgctcgatgacacccaaagcgaagctgcgagagtgctagcggacaacctcaaattgaaaaaggagcttcagtcaaacaaagaatccatcaaaagccagataaaacaaaaagatgaagacctcttgcgaagactggagcaagcagaggagaaacaccggaaagagaagaagaacatgcaagagaagctggatgccttgcacagagagaaggcccacgtggaagaaacgcttgcagagattcaagtcagtctgaccaggaaagaccaggagatgaaggagctgcagggaagcctggatagcaccttggcccagcttgcagccttcactaagagcatgtcatccctgcaggatgaccgggacagggtgatcgatgaagctaagaaatgggagcggaggtttggcgatgccattcaaaccaaagaggaagaggtcagactcaaagaggagaactgcattgctctaaaggatcagctccgacagatggccatccacatggaggaattgaagatcaccgtctccaggcttgaacatgacaaggaaatctgggagtccaaggcccagacggagctccagcatcaccagaaggcttatgataagctgcaagaggaaaataaagaacttacgtctcagttagaagacgctcgccagctgtatcatgattctaagaatgaattaactaagttagaatcagaacttaagagtctcaaagaccagacaactgacctaaataactctttagaaaaatgcaaagaacacgaaaacaacttggaagggatcataaagcagcaagaagctgatatccaaaattgtaagttcagttgtgaacagctagagactgacctagcggcctccagagaactcaccagtcggctgcacgacgaaatcaatgcgaaggaacagaagatcataagcctgctttctggcaaagaagaggcgatccaactagctgttgaggaactgcaccagcaacacagtaaagagatcaaagaactagaaaacctgttgtcccaggaggaagaggagaatgtggccttagaagaggaaaacaaaagggcccttgagaaaaccaatcagctcacagaagcattggaagccatcaagaaggagagctttgagcagaaggctcagttggactcctttgtgaagtctatgtcctctctccaggatgaccgggaccgcatcgtaagtgactatcggcagctggaagagcgacatctctctgcaatcttggaaaaagaccagctcatccaagatgctgctgctgagaataataaactgaaggaggagatgcgagggttgcgaagtcacatggatgatctcaattctgagaatgccaagctggatgcggagctggtccagtataggcgggacctgaacgaggtgatagccataaaggactctcagcaaaagcagctccttgatgctcagctacagcagaataaagagctgagaaatgagtgtacaaagctagaggaaaggctgaaagggttagaagcagagaagcaaagcctacaaatgtcctccgatgccctccagaaggagaaacaaggtttgtctaaagagatcaaaaacttacagacacagttgaccgccctgcaggaagaaggaacgctaggtgtctaccatgcccaactgaaagcaaaagaagaagagctccagaggctaaatatggctctctcctcctcccagaagagaactgcagatctggaagaggagttagtttgtgtacagaaggaagctaccaggaaggtaagtgaaattgaagatcagctgaagaaagagctgaagcacctccatcacgacgcagggataatgcgaaacgagacagaaacagccgaagagagggtggcagagctggcgagagacctggttgagatggaacagaagttgcttacggtaaccaaagagaataaggatcttatggcgcagattcaggcctttggaaggtcaatgagctccttgcaggacagcagagatcatgccactgaggagcttggtgacctgaaaaagaagtatgatgccagtctcaaggagctggcccagctgaaagagtggcaggactcaagcagagagggggacgttctttcccaggctgcctttcccctgtccacctctgagaacgtcttgtcccgccttgagaaactgaaccagcagctcacatccaaagacgagcagttgcttcacctatcttcagaactagaaagttctcacaaccaagtgcagtccatctccaaagccatgaccagtctacagaatgagagagatcgcctatggagtgagctggagaaattccggaagtctgaggaagggaagcagagggctgcagccccttcagctgcctccagcccagcagaagtacagagcttgaaaaaagccatgtcttcactccagaatgacagagatcgattgctgaaggaactgaagaatctgcagcagcagtacttacagatgagccaagagatgaccgagctccgtccgctgaaggctcagctccaagaatctcaagatcagacaaaggcactacaggtgatggaggaggagctcaggcaggaaaacctctcctggcaacacgagctgcgtcagctcaggatggagaagaattcctgggagctgcatgagaggaggatgaaggaacagttcctcatggccatctcagataaagatcagcagcttggtcatctgcagagtctcctgagggagctgaggtcttcttcccaggctcagattctctccacacagtaccagcgacaggcatccccagagacatcagcttccctcgatggatcacaaaagctagtttatgagacagaacttctcaggactcagctcaatgacagtttaaaggaaattcatcaaaaggagctaagaattcagcagctaaacagcaagttctctcagctgctcgaggagaagaacgtcctctccacccagctcagtgacgccagccagagtctccgtgagaaccagcaccactacagtaacctcttcaaccactgcgccatcctggagaaggaggtgcagaagctgcaggcggggccgcttaatacagatgttgctcctggagcaccccaggaaaagaatggaatgcaccgaaagagtgaacctgagaccacaggagaggagcagccaagcttctctgaagtccagcagcagctgtgcaacactaaacaagatctgagagagttaaagaagctgctggaagaagagcgagaccaaaggctgaccgctgagaatgcactctccctggccaaggagcagatcagacggttggagcatagtgaatgggaatcggcccggactcctatcatgggtgcctgtggctctcaggagcaggcgctgctgatagatctcccaggccatagctgtcgaaggacccggagtggtgccggatggaagcgggtcctgcgttcactctgccattctcgaacccgagtgccactgctcgcagccatctacttcctaatgattcacgttttactggttctgtgtttcacgggtcacctataaacttgttacttgactgcaactctggaacttgtaattccttcatctctagtgtcaggattgtcgattccacagcagccttctcactttagcccctccacctcttcttggaaagtgcctgtgaaaacagaggtggctgtgaggacaggcagagccttaaagcctgccacatccgctctccttaaacacttgtgcttggtctgagcagcttcccagatgtgctgtgctcactgctcttcagatgttgcagatccacatcctgtgtggtcttgtaggatgctgagggaggcctcccagccaggccaacaagatggttccaataaacacagtaatttggaatccagtatcacttttcttggtaaccggctttgtcttgtggcctgtattttctcctgcctcaggatgaatacaaagttgtgggcgtgtgagcagtctttggagactcaggtgggagctggaaggctcccagacttcagttgttggatctcggggaggaaggcattttcttcctgcctgttgcattgccagcggagggacggtttgttgctgtggatcgtcaggactggaccccattgcttatgccttcagtcacatgtagactaagatagtaagtggccagtgcctttccttgcatcaaaaggcaggaagaactgacaatggacagacagcaaggttcgaattctatatttctggatgtgcctccataggggtcctaagactatccagaggccagtggggccatgccaaggtgaactggagtcagggctgaataccacatcacaactagtctcaagaactactgagctgctgcaccagtgtgctggtccttggttattctgtctccaacgccattgtcacccaccactgggcacagggctgaggcggtggaaagaaaaggcaaagcacctggatccagacctgagagcagtggccaggaatggatggatcccaccgtgtcgatcctcccctttacggacatgatgtgctcccttcctgttctcaccccctaaagaagagtgaactgctggactcactcatcagccctttgttctgtggtgatgaaaattttagtcacaacatcccaaaaccttaactactgtaaaataataaaattattttcagaat

SEQ ID NO: 139 - DNA, 2860 bp, Mus musculus
gctgccacattctccaacccaaggagaccagacagaaggacgtggtcactctgaacagttcaacccaagagacaaaaatgcagtgggcctccgtcctgctgctggctgggctctgctcactttcccagggccagtatgatgaagactctcactggtggatccaatacctccgaaaccagcagtccacctactacgacccctatgacccttacccctatgagccctctgagccttacccctatggagtggaagaaggcccagcctatgcctatggtgcaccacctccaccagagccccgtgattgtccccaagaatgcgactgtccccccaacttccccacagccatgtactgtgacaaccgcaacctcaagtacctgccttttgtgccctcccgcatgaagtacgtctacttccagaacaaccagatctctgccatccaggaaggtgtctttgacaatgccactgggctcctctgggtcgctctacatggcaaccagattaccagtgacaaggtaggcaggaaagtcttctccaagctgaggcacttggagaggctgtacttggaccacaacaacctgacccggatgcccggcccgctgccccgatccctgagagagctccacctggaccacaaccagatctcacgggtccccaacaatgctttggagggcctggagaacctcacggccttatatctccaccacaatgagatccaggaagtggggagttccatgagaggcctccggtccctgatcctactagacctgagttataaccaccttcggagggtacccgacggtctgccctcagccctggagcagctgtacctagaacacaacaatgtctacaccgtccctgacagctacttccgggggtcacccaagctgctgtacgtccggttgtctcacaacagtctcactaacaacggccttgctaccaacaccttcaactccagcagccttcttgagctagacttgtcttacaatcagctgcagaagatccctcctgtcaacaccaacctggagaatctttacctccagggcaacaggatcaatgagttctccatcagcagcttctgcacggtggtggacgtcatgaacttctccaagctgcaggtgctacgcctggatgggaacgagatcaagcgcagcgcaatgccggtggacgccccactctgcctgcgcctcgccaacctcatcgagatctgaggggcctcgccttgggctcctggctccgggctccgagtaccgtgcaccgtgcaccgggctcggggtacatgccctgccaccccgctgcatgtttggcttttgctggatggtctgggacacgcatgtgacagaagtccacaggatcttattcaatctccttccaacaggcagagttaggtgggatcaggggccaggccagtttctgcagggggatgaatttggtggtaaaagaaatatagctatagagtctagccccaaaatcttcttgcttggacagtagcatataaccagttccaatttgaccttttttgagctgtgctcaacagcatggccagctgcttctgcagttgctctgggctcctgctctttgctcctcaaaacatcacaacacacctcttgcccagtcacctcctcccagccccagctcaccctctctgccctctttcactggggcctcttctaatgtcttaggcagtcaggagacacccacaccctaagggcacactcttatctgaggctaaacggatggctaaaatcacacacttacccccacctcacctgtttaaagtcaccatattgaacaccataatgatgagctgttaacataggggataaccgactctataatggaggatctatcagaggagggaagtgtccagtggtcattatcagtatccatagtaagatggggaagagacacacctcaggatagcagaactgaaggggcagccccctttccagtttcatctgacacaacatgatctgcaccccttcttgggcttttagtatcgaaggggcaagcgtggttttcaaaacatgagaaagagcctctgctcatcctttggtctagtatgaagggttgttacgcaaatggcagaggcagactccacccgccgaggacctacccactaacccagactagggggtgatctcaatagctcgtttgtccataatgctagagcatcaggaaccagccctgtggagatgctcactggggtgcaagaagccctgccaggcccaagtcctgccgacactagacctggcttcctctgcattcacactatgcagtccgccttatgcccagtggtgcctgtgatttgtagtttgtctaagaacagccccatcttctcctttttaaaggtgatattgcctaggtacaaccaacagcttcttctagaccccactgggatagagccaccagggtagcgagtggcaagaagcagttgtaagatgctagcctgaggtgggtccctgccttagacccctgactctgtgtgcacttgggagcaagcttctctggaaaggacagggtggggcggggtgcttagactgtgctacgggttccagaactgcaatccacaaaagccaaaccagcttgtttcaaccggggagtgccacctgcggagcaaggctgccctggccagggttcttgggaagcacctgcatgtatcaccatcctgcctctgaagagccctcagcatgaagcaagcatgaatggcggccaacctaaccaataaagttattttataagtgcatctgcaaggatggaatggttggtggcagccctcggcatcgcctcggggtacctagacacacaggccttgaaccgtgtcagctctttataaagagtagcctatataaaaactcaagtt

SEQ ID NO: 140 - DNA, 1787 bp, Mus musculus
tacctggttgatcctgccagtagcatatgcttgtctcaaagattaagccatgcatgtctaagtacgcacggccggtacagtgaaactgcgaatggctcattaaatcagttatggttcctttggtcgctcgctcctctcctacttggataactgtggtaattctagagctaatacatgccgacgggcgctgaccccccttcccggggggggatgcgtgcatttatcagatcaaaaccaacccggtgagctccctcccggctccggccgggggtcgggcgccggcggctttggtgactctagataacctcgggccgatcgcacgccccccgtggcggcgacgacccattcgaacgtctgccctatcaactttcgatggtagtcgccgtgcctaccatggtgaccacgggtgacggggaatcagggttcgattccggagagggagcctgagaaacggctaccacatccaaggaaggcagcaggcgcgcaaattacccactcccgacccggggaggtagtgacgaaaaataacaatacaggactctttcgaggccctgtaattggaatgagtccactttaaatcctttaacgaggatccattggagggcaagtctggtgccagcagccgcggtaattccagccccaatagcgtatattaaagttgctgcagttaaaaagctcgtagttggatcttgggagcgggcgggcggtccgccgcgaggcgagtcaccgcccgtccccgccccttgcctctcggcgccccctcgatgctcttagctgagtgtcccgcggggcccgaagcgtttactttgaaaaaattagagtgttcaaagcaggcccgagccgcctggataccgcagctaggaataatggaataggaccgcggttctattttgttggttttcggaactgaggccatgattaagagggacggccgggggcattcgtattgcgccgctagaggtgaaattcttggaccggcgcaagacggaccagagcgaaagcatttgccaagaatgttttcattaatcaagaacgaaagtcggaggttcgaagacgatcagataccgtcgtagttccgaccataaacgatgccgactggcgatgcggcggcgttattcccatgacccgccgggcagcttccgggaaaccaaagtctttgggttccggggggagtatggttgcaaagctgaaacttaaaggaattgacggaagggcaccaccaggagtggagcctgcggcttaatttgacccaacacgggaaaccccacccggcccggacacggacaggattgacagattgatggctctttctcgattccgtgggtggtggtgcatggccgttcttagttggtggagcgatttgtctggttaattccgataacgaacgagactctggcatgctaactagttacgcgacccccgagcggtcggcgtcccccaacttcttagagggacaagtggcgttcagccacccgagattgagcaataacaggtctgtgatgcccttagatgtccggggctgcacgcgcgctacactgactggctcagcgtgtgcctaccctacgccggcaggcgcgggtaacccgttgaaccccattcgtgatggggatcggggattgcaattattccccatgaacgaggaattcccagtaagtgcgggtcataagcttgcgttgattaagtccctgccctttgtacacactgcaccctcattaaaactgctctgaattgctaaaaaaaaaaaaaaaaaaaaaaaaaaaaaaaaaaaaaaaaaaaaaaaaaaaaaa

SEQ ID NO: 141 - DNA, 1278 bp, Mus musculus
cgagagagaaggctgtaatggcggctgtgactgaagttgtggtccccgcggatggcgcggaagccaggcccttggcggccgaggagctggcggcgcagaagcgggagcagagactacgcaagttccgtgagctgcatctgaagcggaatgaagctcgtaagctgaatcaccaggaagttgtggaagaagacaaaagacttaagttgcctgcaaactgggaagccaagaaagcgcgtctggagtgggagctccaggaagaggagaagaaaaaggagtgtgcagctcgaggggaagactacgagaaggtgaagttgctggagatcagcgcagaggacgctgagaggtgggagaggaggaagaagaagaagaaccctgacttggggttttcagattatgctgctgcccaattacgccagtatcaccggctgaccaagcagatcaaacctgacatggaaagctatgagcgacagagagagaagcatggagaagattttttcccaacatccaacagtcttctccatgggacgcacgtgccttcctcagaggaaattgacagaatggttttagacctggaaaagcaaattgaaaagcgagacaaatacagccgaagacgcccgtacaatgatgatgccgacatcgactacatcaatgagaggaacgccaagttcaacaagaaagcagagaggttctacgggaagtacacggccgagatcaagcagaacctggagagaggcacagctgtgtgagcttaaacctcgggagcagcgcagaagctgggaacggtcggtcggaggcttctgctggcaaattcaacctccctcgtgggaccagtcgattactgtcccacttcccctgcctccccactgggcttctgaaataaatgtcttttctcacctcctctgccacatgcatatgttcacatttttgtgcttggatagacgatgtatttcttgtagtaattgatgttttgtaaaaatctaatttgtataaatcctaattattatttttctatgtattttaaatgtgcataaccatataacctttgaattattggggcttagatgtacacgggtgcagtcactgctgcttttgagtgttgttaggaggaagacggaagctccagccgggctttgggactggccaggaggggactgagaagcagaggctgttgagacagatgctcctggagatctggcactgtgcccggactggagtcagaggtcatggccgtcagccgtgcacactccctttttaaagaacaataaaatgctttggaat

SEQ ID NO: 142 - DNA, 1810 bp, Mus musculus
  misc_feature (657)..(657): n is a, c, g, or t
acacaagaacttcagaacattgctgcagaatactgatacaggcgctgcagctgccttcactatggatggtgtgagcacagccatcttgcttctcctcctggctgtcatctctctgtccctgaccttcagctcacggggcaagggccagctgcctccaggacccaaacctctcccaatcctgggaaacctgctgcagcttcgctcccaagacttgctgacctccctcaccaagcttagcaaggagtatgggtcggtgttcacggtgtacctggggtccaggcctgtgatagtcctcagcggataccaaactgtgaaggaggctcttgtggacaaaggggaggagttcagtggccgaggcgcataccccgtctttttcaacttcaccaggggcaacggcatcgccttctccgatggagagcgctggaagatcctcagaaggttctctgtccaaatcctgcggaactttggcatgggaaaaagaagcatcgaggagcggatcctggaagaaggcagcttcctgctggaggtgctgaggaaaatggaaggcaagccctttgaccccgtgtttatcctgagccgctctgtgtccaacattatctgctctgtcgtcttcggaagtcgcttcgactatgacgatgagcgtctgctcaccatcanccactttatcaatgacaacttcaagattatgagcagcccttggggcgagatgtacaacatcttcccaagtgtccttgattggatacctgggccacacaaacgcttgttccggaactttggaggcatgaaagatctcattgcccgcagcgtccgcgaacaccaggattccctggaccccaactctccccgggacttcatcgactgcttcctcacaaagatggcacaggagaagcaagacccactgagccacttcaatatggataccctgctgatgaccacacacaacctgctcttcggtggcacagaaaccgtgggcaccacactgcgtcacgccttccttattcttatgaaataccccaaagtgcaagcccgcgtgcaggaagagattgaccgtgtggtggggcgctcgcggatgccgacgctggaagaccgtacatccatgccttacacagatgcagtgatccacgaagtgcaacgctttgctgacgtcatccccatgaacctgcctcaccgtgtcactcgggacacacctttccggggcttcctgatacccaagggcacagatgtcatcacactccttaacactgtgcactacgactcggaccagttcaagacgcctcaggagttcaatcctgaacattttctggacgacaatcattctttcaaaaagagccccgccttcatgccattttcggctggacgtcgactgtgtctgggagagccactggcgcgcatggagctcttcatatacttcacctccattctgcagaacttcacattgcagccgctggtggatcctgaggacatcgacctgaccccgctcagctcagggctgggcaatttgccaaggcctttccagctgtgtatgcacattcgctgagtactgcgcccagggacccctgtccttcttccagttggggttcactgtcataggcctccattgatatctctctcacatgatcttcccttaaccctgggcctgccacgtatcagtactttaccccgcctatcttaagcccatcttcatggaaagaatgacgtgacaaaggtgaaatacccgtcttatacgcacagaacctattctatgatgcacccttttcctgtctgtttgtatcatttcctagtaaatatcttaataactgaaaaaaaaaaa

SEQ ID NO: 143 - DNA, 1037 bp, Mus musculus
agcagtgagctgaacaagttactgagcggctggaggtctctgctccaactcttggcattgaccttggcccagagtcttcaccatgccaaactggggtggaggtgcaaaatgtggagcctgtgaaaagacggtctaccatgcagaagaaatccagtgcaatgggaggagtttccacaagacctgtttccactgcatggcctgcaggaaagctctggacagcaccacagtggcagctcatgagtcagagatctactgtaaggtgtgctatgggcgcaggtatggccccaaggggatcgggttcggacaaggcgctggctgcctcagcacagacactggcgagcatcttggcctgcagttccaacaatccccaaagccagctcgagcagccaccacaagcaacccttccaaattctctgcaaagtttggagaatcagagaagtgcccacgatgtggaaagtcggtatacgctgctgagaaggtcatgggaggtggcaagccctggcacaagacctgcttccgctgtgccatctgtgggaagagcctggagtctacaaatgtcactgacaaggatggggagctctactgcaaagtttgctatgccaaaaattttggccccacaggcattgggtttggagggcttacacagcaagtggaaaagaaggagtgaagctgcctgctttctcacagccctatcagtcaacagcagtgccacgtgatcccacagatgtagtttgtccccaacagcctcctttgtagctggacagcatttctcttcagaagcagtcataggctgcaccgaagtaacaagagaccactgggaatgttatctgcaacagatgcttcactatttactattcttgggatgggagagacaataaatgttttagtggtaccatctcaaaaaaaaaaaaaaaaaaaaaaaaaaaaaaaaaaaaaaaaaaaaaaaaaaaaaaaaaaaaaaaaaaaaaaaaaaaaaaaaaaaaaaaaaaaaaaaaaaaaaaaaaaaaaaaaaaaaaaaaaaaaaaaaaaaaaaaaaa

SEQ ID NO: 144 - DNA, 2610 bp, Mus musculus
ggtcgcactgcatcgccatcttgagctgggtgctgttttctcagcctgggctatttgttgtcgtctgtaggccttaaggtggcattttagagaccgtgtccttctgtccccagtgctgtgacactgctctgacatcttgatgaggcaggtatagaaaagacacccagtagaacacactggaatcggcatgaaaatgtgcttggaaattcctgggttttttctctgctgtagtcacagtcatgtttacggcctccatcttccaagaagagtgatggttctgggacatacactaagctgcagaatacccaggtgagggtcatgtctgagaagaagccacgaaaaagggtggaatcagaaagcaagcaagaaaaggccaatcgtataatatcagaggccatagcaagagcaaaggagcgaggggaacgtaatatcccgcgagtaatgagccctgagaactttcctagtgcttcagtcgaagggaaagaagaaaagagaggtcggaggatgaaatctaagccaaaagacagagacaacaaaaaaccaaaaacgtattctaagttgaaagagaagacaaaaattggcaagctcatcattacattgggtaagaaacacaagagaaggaacgagtcttccgatgagctgtccgatgccgagcagaggtcccagcacacgttcaaagagcagcactctcaaaaaagaagatcaaatcgacaaattaagaggaaaaaatatgcagaagatgcagaaggaaagcaatctgaagaagaagtgaaaggcagtctgagagttaagaggaagctcggctcctccgcctggagagcagcctctgcagctgtttgtggaaaatccaagtgaagaagatgcttcaattgtagacaaaatactagcttgtaggactgtaaaaaaggaagtatcacctggagttatgcttgatatagaagaattttttgtaaagtacaaaaattactcttatctccactgtgagtgggccacggaacagcagcttttgaaagataaaaggatccagcagaaaatcaagcgattcaagctgagacaagcacagagggcacactttttggcagatatggaagaagaaccctttaaccctgactacgttgaagtagacagaatattggaagtttctttttgtgaagataaagatactggtgagtctgttatttactacttggtaaagtggtgctcactgccatatgaagatagcacctgggaattaaaagaagatgtagatcttgcaaaaattgaagagtttgaacaactgcaagcttcacggcctgacacaagacacttggaccgtcctccctctaacatttggaagaaaatagagcaatccagggaatataaaaatggcaatcaactcagggaatatcaactagaaggactcaactggctcttgttcaattggtataatagacgaaactgcattttagcagatgaaatgggtcttggcaaaaccattcagtcgattacattcctctacgaaatcctgctgacgggtataagaggacctttcctgattattgcaccgctttctaccattgcaaactgggaaagagaattccgaacatggactgatattaatgttgtcgtttatcacgggagcctgattagcagacagatgatacagcaatatgagatgtacttcagggactctcaggtgtgctgttactgattttgtttcctttttaaagactatggctgaatgcgactgtgttacatgtcaacaatttgcaattttttattcagattttaattacatacttgaggctcatttgtatttatattgtgctaagatttagtacctgaaaagcagcaactagagccagtttaacatttctagtttactatagcacagaatattgattataaaaatgtgtaagtttagtatagtctatggttcctaactaaatttatttatattaattaattaattaattaattaattttgagacagggtttctctatgtagccctggctgtcctggaactcactctgtttggcctcaaacttagaaatctacctgcctctgcctttcaagcgctgggattaaaggcgtgtgccaccactgcctggcctatttttattttttaacttctcttaaatatccattatttcttgatataactgtctttgcaccttcttgttcctgcactatcctctttcaacactgactcctcagtgactaggaagaccgtaaatgcatactgaagtgaacctcagtctttctttcatggtcagtgtcttttgattttagtgttgtttgtttttctctttggtttgtgggctggcagggacagatccacagtaaagcctctgcgtagcatgattacctcatgattctataagagagacagagacagagagagagatagacacagacagaacaaactggaaaaacataaaactccaagttgtagtcttgaatgttaatatgatttttctgataaaaaatacttttttcagaaataaaagcaaaatcagtaaacacaatccaggcagcattatactgttaaattgcagcaggtttattgtctagctggccacctcagtagctcctaaatatcctttctttcatttattgctttgtccttt

SEQ ID NO: 145 - DNA, 1305 bp, Mus musculus
gcagcctcctgctgccagggacatctttggagtgagcaccacacttcaggatgaccatgagggctcctggccacgctgccataagatggctgttttggatgcccctggtgtgctctgtggcaatggagcaactgcagagagaccctaccctggactaccattgggatctctggaagaaaacccatgagaaagaatacaaggataagaatgaagaagaagtacggcgtctcatctgggaaaagaatctgaagtttataatgattcacaatctcgaatattctatgggaatgcatacctaccaagtgggcatgaacgatatgggagacatgaccaatgaagaaatctcgtgtcggatgggtgctctgagaatttcccgacagtctccgaagactgtcactttcaggtcatactctaatcggacattgcctgacactgtggactggagagagaagggctgcgtcactgaggtgaaataccagggttcttgtggtgcctgttgggctttcagtgctgtgggggcccttgaagggcagctgaagctgaaaacggggaagctgatatccctcagtgctcagaacctggtggactgctcaaatgaagaaaagtatgggaataaaggctgtggaggcggctacatgaccgaagctttccagtacatcattgataatgggggcatagaggcagacgcttcctatccctacaaagccatggatgaaaagtgtcactataactcaaaaaatcgagctgctacgtgttcaaggtacattcagctcccctttggtgacgaagatgccctgaaagaagcagtggccactaaagggcctgtctctgtgggcatcgacgccagccattcctccttcttcttctacaaaagcggtgtctatgacgacccctcctgtacgggcaatgtgaatcatggtgttcttgtggttggctatgggactcttgatggcaaagattactggcttgtgaaaaacagttggggccttaactttggtgatcaaggatacattcggatggcaagaaataataaaaatcactgcggaattgctagttattgctcttacccagaaatctaaaccatttcttctttttctaacaagtcacaaagatggaatatactctaacttaatttgcctgcaatatccagaggaaccaagtgtgtcgtgatcaatgtgtagttactgtactaactaggttatagctatttttacaccctgttgtctagtgttttctaataaccatttgtaacatgatagccccaaagtgcttaataaaatctgtcattgcaaaaaaaaaaaaaaa

SEQ ID NO: 146 - DNA, 1892 bp, Mus musculus
acaacggcagtagcaacagccaggggagcaggcttgcagcaagtggcccaaccccttcaagtctagatctgcctgtgacaaccagcttctgggtgaccagtgaccagttcttgccccaggatggggaccgtatccagagcagccttgatcttggcctgcttggctcttgcttctgctgcctctgagggagccttcaaggcttcagaccagcgagagatgacgccagagcgcctcttccagcacctccatgaagtaggttatgcagcacccccttccctaccacaaacccggagactccgagttgaccactctgtaacttctctgcatgaccctcccctctttgaggaacaaagagaagtgcagcccccttcctctccagaagacatccctgtgtacgaggaagactggcccactttcctaaaccctaatgtagataaagctggtcctgctgtccctcaagaagccatccccctgcagaaagagcagccccctccccaagtccatattgaacagaaggaaatagacccgcctgcccagcctcaggaggagattgtccagaaagaggtgaagccacacaccttggcgggccagctccctccagagccccggacttggaatccagcccgtcactgccagcagggacggagaggtgtctggggccaccggctggatggcttccctcctggacggccttctccagacaatctgaagcagatctgccttcctgagcgtcagcatgtgatctacggcccctggaacctgccgcagactggctactctcaccttagtcgccagggagagaccctcaatgtgctggagaccggatactcccgctgctgtccgtgccgcagcgacacaaaccgcctagactgtttgaagcttgtgtgggaggatgcaatgacccaattttgtgaggccgaattctctgtcaagacccgcccccacctgtgctgcagactgcgtggggaggagcgattctcttgcttccagaaggaagctcctcgcccagactacctgctccgaccctgccccgtccaccagaatggcatgtcctcagggccccagttgcctttccccccggggttgcccacaccggacaatgtcaaaaacatctgtctcctgagacgcttccgcgccgtgccacgcaacctcccagctactgacgccatccagaggcagctgcaggctctgactcggctggagacggagttccagcgctgctgccgccagggccacaaccacacttgcacatggaaggcctgggagggtaccctggatggatactgcgagcgggagctggctataaagacccacccccactcgtgctgccactaccctcctagtcctgcccgtgatgagtgcttcgcccacctagctccctatcccaactatgaccgggatatcttgacccttgacctcagccgagtcacccccaacctcatgggccagctctgtggaagtggaagggtccttagcaagcataaacagattccggggctgatccagaatatgaccgtccgctgctgcgagcttccatatccagaacaggcctgctgcggcgaagaggagaaactggccttcatcgagaacctctgtggtccccggaggaattcgtggaaagaccctgccctctgctgtgacctgtctcctgaagataagcaaatcaactgcttcaataccaactacctgaggaacgtggctttagtggctggagacactgggaatgccactggcttgggggagcagggcccaactcggggaacagatgccaaccccgcccctgggtccaaggaagaatgagtcaccctgagcctcagaggattagatgggggaactccgccctactccaccctcctcgaacactcattacaataaatgcctcttggatttgg

SEQ ID NO: 147 - DNA, 3431 bp, Mus musculus
gagatcatcatggcgtctcccagtgggaagggatcttggacgcccgaggctcctggttttgggccgcgggcgctagcacgggacctggtggactcggtggacgacgccgagggcctttacgtggctgttgagcggtgtcctctgtgcaacaccactcgccggcggttgacttgcgccaagtgcgtccagagcggtgatttcgtctatttcgacggccgcgaccgggagaggtttattgacaagaaggaaagactaagccaacttaagaacaagcaagaagaatttcagaaagaagtactaaaagctatggaaggaaagcggcttacagatcagttgagatggaaaataatgtcatgcaagatgaggattgaacagctgaagcaaacaatatgtaaaggaaatgaggaaatgaagaaaaattctgaaggtctcctcaagaacaaggaaaagaaccagaagctttacagccgagcacagcggcaccaagagaaaaaggagaagattcagcggcacaaccgcaagcttggggacctggtggagaagaagaccattgacttgaagagtcactatgagcggttggcgcggcttcgaaggtcacacatcctagagctcacctccatcatattcccaatcgacgaagtgaagacttctgggagagaccctgcagacgtgtcttcagagactgacagtgccatgacctcaagcatggtgagcaagcttgctgaggcccggaggacaacttacctctctggaagatgggtctgtgatgaccacaatggtgacaccagcattagcatcacaggcccgtggattagcctaccaaacaacggggactactctgcttactacaattgggtagaagagaagaaaacaacccaaggacctgacatggagcataacaaccccgcctacactatcagcgccgcgctgggctacgccacgcagctcgtcaacattgtgtctcacatacttgacatcaatcttcccaaaaagctgtgcaacagcgagttctgtggcgaaaacctcagcaagcagaaactgacacgcgcagtgaggaaactgaacgcaaacatcctttacctttgttcttctcagcatgtaaatctggatcagttgcaaccactgcacacactcaggaacctgatgcacttggtcagcccgcgctctgagcacctaggcaggtcaggaccctttgaagttcgagcagacctcgaggagtccatggaatttgtggaccctggagttgctggagaatcagacgcgagtggagatgagcgtgtaagcgatgaggagactgacctgggcacagactgggagaacctgccaagcccccgattctgtgacatcccttcccagccggtggaagtgtcccagagccagagcacccaggtgtccccacccattgccagcagcagcgctggtgggatgatctcctccgctgcggcctcggtgacctcttggttcaaagcttacactggacaccgctaacgagttgggaccaaaaatgctgattttgtgtctcagagtctttcccactgcactctcataaccttgtctgtgtagttgcgatagagcttggaagctatcgccaggacaagattagtgtcagggcctgagctcggggctcctgggcccaggtcctcagtatgctggttcctgggtgcagagtctccctgacactaagtcctaggctttgatcagatcacaaagaagtgtttcttggtaatgaggaatgaaagacaaaggctgagtttgtttttctgtcatcctcttgagagaccagccagcaggccagcagcagtttggcctcatccgggagaggtggttgtctggggaaggaggaaatgaaagcttattgcttattgcttattgtcagtcattgtgcgtcacattcctgatttcctactacacaccaaagaaaccaaattctttatttctgtagacccatatctgcgaatggggagtctgctgggatggttagatgtctaaacagttctcttgtattctgaagggagataagtcattgggattgtctgtactacactcacttcctccatcattccctggatgggctaaatgctacccgagcgttggctgaacacttacgtggtcactcgcttgctgtccggtttcttccttggtggtggtggtggggttaactagtagcaggtgtttccagggaactcttccttcttgttcctgaggtcttcttgtccctggggtctctgagactgaagacagcaccttatgcagagtgtagcgcggagcagctgtcccaggaaatgctcagctgtcaagggatttcctcagaggtcattctaatgacaatcttatagaaagctataaaaagagaggcattatgttcaagtcataaggagttctttttttatttttagtaacttcaaaaaggaagttctgtgtaacagactcctgcagtcctgtgagaaagcacccccctcccctggccttgtcaccatatcctcctgttgtgactggtgtgatggtacctcagccaggtccttcagcagtctgccacgccctggcttctgttgactcacactgtggttggtactttgcctgcagattgaggtgctgtggcgctttggcagttattagaagtgtaggaaggacttcatcctgcccaggttccccacgttcccaagctctagatacccagctgtggagcaggcggctggagtctgttctgtgctcagctctgcgactgctgggctcgtgttttaccacctacttctaggacttacagactgagtgcgctgggaggaagctacagaaagtgcagaggccaccaactaccgcctacagcaatttaaccacagttgcagaaagcacagggctgggtggccttgttttatttcatatcaatcagaggcacttttgtcatcgtccctcacagtaagtgaccagcacggactgcctaggctgctcaagtccttggggttttgttattttgcactggatccacctgttgtaaatagtcttaaatacacatttcaaccactgtttggttcctacactctttgctgctcattaaaactttttgtgtaggtgtcagaaccgtacacaaacagctttctagaaaaaaaaaaatgaagctggtgttttgttttttttttttaaaccgaaagccatagaagttgatcatgttttccatttaaaaatgatttcttggaacaaggtaatactaatagacactcagaggcaccacatgggctgctttacatggtcttacgtagaaccaagaaatgtaacttaccatggtatgggggtcagcattgggtggggttcaggtgtgcattgggaaagctgcaacgtcagaacccccttgctgcgactgaaacttccaggtcaggttgatcacacagatgttttctaaacctttgttgtattactgcaataaatcctttaacagt

SEQ ID NO: 148 - DNA, 2909 bp, Mus musculus
ctcagagggaagtggcctctcaccaaaaccgtttgcgttctcaatactggccagattgaaactgccactcctagaagagagacccagacctagaactcccacctgtgtgaggccctgaagcccctcatgaatccccgaaagaaagtggacttgaaacttatcattgttggtgcacttggcgtgggaaagacctctcttcttcaccaatatgtacacaaaacatttttcgaggaataccagaccacactgggggccagcatcctctccaaaatcatcatattggatgacacaactttgaagctgcagatctgggacacaggtggtcaggagcggttccgctcaatggtatcaacattctacaaaggttccgatggctgtatcctggcatttgatgttactgatccagagtcctttgaagccctggatatctggagggatgatgtcctggcaaagattatccctatggagcagtcatatcccatggtggtgctggggaacaaaatcgatctggaagataggaaggtgtcccaggaggtggtccatggatggtgtaaagagaaggatatgccatattttgaagttagtgcgaagaatgacatcaatgtggtacaagcctttgaggttctggccagccgggctctgttgaggtaccagggcaccgcagagaaccacctcatagactccatcaagctctctccaggccagccaaagagcagatgctgctgatcctggcctccctccggactcccgatgacagctgtgcagccattccaagtgcaatcccaccagccggtactcagctaggaggctggggcactgcagcaggagagaatgtcacaggcaaatcctggtcccagagaaatcacgggcgtctccatgactcaagctcctctttctcctctgcctcaacaccgtcctgctcatctctgcagacaaactgctcccttcagcaccatggaccgacaggtttggatggagatgcagttctgattccctcagcagccagaacatggaccgctcctgacaggcagaagcccacaggcctgagacttcccacagcttctttcagggagagctgagggagcaagataaaaacagttgtacctatttcctgggtgctcaaacagctcccataactgaccaggcctcagtgcgccctctgccaaatgagagttcccaaggcttccccatatcctagggcgactgagaaccataatctcatttaaatcccacgtgctggtgtggacacacatgctcactcctttggagagtatttttgatgccttcgatgtacattgcactgaagtcaccagacacacaaagcagacatgagtccttcactcccagaagcgcacctggagagagagggccagcagacatgagcaagacagacaacagcaacgaggtactgttttagacaaaggggccaagagggctttcctgtgacggtgaccgttgggctggcagctccaggaagagctacaggaagaacatgccaggagagggagcagctaggccaaggctctgaggcaatgggcagagtgctgcattccattccctgaggactcaaagctgctcagagaaaaaaaggccagggatgtcctgtccccagaaggtactttgatcatttgatgactggccactagggggcagaagtgtcctctgcttttaggctgaggagttctggtaacacttgaaaagctggtgtttgtgtcaagaaaatggctgaagcttgttcccaggctgtaggaatgttgaacctgggctagttgggttaaaaaaaaaaaatcaaatgtcttgattcaggcaacaaatcgaaatcagagacagatcccagagcgaggtacttggagagctgtggattctgtgtcctgttcatttcaaagctagaacctatttttttttcttctggcttcacactgcacagatagggtggctcattctgaaggaggtggacagaacgaactttcagggtcttcaatggtcaggttcatacctcatgccttccacagacattcctgtctccacagaagtcttctttcctgagttccaagcagatccgaggtgccaatctcttacacgcattctcacgaccggccaggaagaacgcagcaaaccagaatcttctgcggcaaaactttattgcttacatcttcaggagcaagagtgcaagagagcaagagctagaaagcaagaaaaagaacaagaacaagaaagcaagagcaagagagagaaaaagcaagaacaagagagagagaaagaatggcaaaaccccgtcccttttaaggagaattatcctccgcctaggacgtattactccctgattggctgcagcccatcggctcagttgtcatcacgagaaaggcagaacacatggcgggaaaactgcccctgcacgtgtgcagattatgtttactacttagaacacagctgtcagcgccatcttgtaatggcaaatgtgagggcggctcccaacatcaatctctaggaagccagtcagggggtactaactgggggtctgggggctctgtctgcacccgcctagctctgaggtataaagcaacttactaaggacagcagtcacaggaacagtgagccctgcgtccttcagagatgaacactgtgcccccgtcacacattggtgtggctctcctgaagtcagactgtggagggatgtgtgtgtgtgtgggggtgcattcggcagcacaatgaacataaggaccatatctaagggtacgcagcaaatagtatgtgtttccattgtttatatcctttatgggacaatagtccctcttggtcagtgataccagtctcagttacccatggtcaactgtggaccaaaaatattaaatagcaaatcccagaaataaataacttacaactttcaatgcaaaaaaaaaaaaaaaaaa

SEQ ID NO: 149 - DNA, 651 bp, Mus musculus
ggaaagaagagaggaaggtgagctatagcttaactcctccagagtgaggagaggctgagcattctactacaggacaggacctcgccccaagcaagccagtgagcagcccggccagaccctgctggactgagagacccagccgctgacagtccctggggcttgccttctttgccaagccaatgggaaaccaaaaggagctcacttcctgttcttcctagctcccctccctgccgctgtgctccgctcctccccacacttccttgctacagttcccagctgctgtaacagagccacctccacctctaacaataaaccaagttcattgcagatggtgtagtgctgcctaggctttccaaggctcctccagacagtaagctatcctggtttccatccctctggttcagttatcatttatcttggaagactctccattattcaaacccatcccaggactcgggagagccagcctgtgtgaaaggaggatgagatgagagaaccatcatcatttctgaaaagaagcagggtgtgatggtgcatgcctgtgatcttaacactcagggtagaggtggaagaattaggagtttgagggcagcctgggctatagaaagttttgggccagcctgagctacacagtgagtgagtccttgtctc

SEQ ID NO: 150 - DNA, 12729 bp, Mus musculus
cgcctcctggtccccgccatggtgctggagtcggtggtcgctgacttgctgaaccgcttcctaggggactacgtggagaacctgaacaagtcccagctaaagctggggatctggggcggtaatgtggctttggataatctgcagataaaagaaaatgctctgagtgaattggacgttcctttcaaagtcaaggctggccagattgataaattaactttgaagattccttggaaaaacctttatggagaagcagtcgttgccacgctagaaggattatacctgcttgtggtccctggagcaagtattaagtatgacgctgagaaagaagaaaaatccttgcaggatattaaacagaaagaactttgccgaattgaagaagcccttcagaaagcagcagagaaaggtgcacactcaggggagttcatgtatggcttggaaaacttgctttacaaggacgtcaagcctggacgtaagcgtaaaaagcacaaaaaacattttaagaaacgttttaaaggtcttgatcgctccaaagataagcccaaagaagcaaaaaaggatacatttctggaaaaattggcaactcaagtaataaaaaatgttcaagtgaaaattacagacattcacattaaatatgaagatgatatcacggatccagaaaggccgctttcatttggtgtcaccctgagagaatttagtctgttgacaactaatgaacactggactccatgcattttaaatgaagcagaaaaaattatatataagctcgtgaagctggacagtctcagcgcctattggaacgttggctgctgcatgtcttaccgtggatcgagggagcacatcttggagcaactgaaacgtgaaattcttacaagtacaaacatccccccagaccatcagtacattttccagccaatatcagcctctgcaaaactctacatgaatcctggtgcagaatcagagctcaaaacccccaaactcgatgggaacgtagaggtgcagaatattgccatcgagctgacgaagcctcagtatttaagcatgattgactttttggagtcactggattatatggttagaaatgcaccatacaggaagtacaaaccttgcttgccacttcacaccaactgtcggcaatggtggaaatatgctattgattctgttcttgaagttcatataagaagatatactcagccatggtcatggagtaacataaaaaaccataggcagttactcaagagttacaaaatggcctacaaaaccaagttaacacaagccaaagtctcagaagagatacagaaacaaatacaggacttggagaagagtctagatgtttttaacataattttagtgagacaacaagcacaagttgaggtcattcattctgggcagaagttaaggaaaaagtctgcggaggcaggagagaaacgtggctggtttagtgggttttggggcaagaaggaatctaagaagagagatgaggagtcttcagtccctgagaccatcgatgaccttatgactccagaggagaaggacaagctcttcactgccattgggtacagtgagaatgcctacaacttggctttgcccaagcagtatgtggcccatatactgactctgaagttggtcagcacctctattataataagagaaaacaggaatgttccagaaatcttgagagtccagataattggcttgggtacccaagtctcccagcgaccaggagcacaagcattgaagatagaagcaaaattagaacactggtacgtcacaggtttgcgacaacaagacattgtgccatcactggtggcttccattggtgacactacatcgtccttgctcaaaattgagtttgaaaccaaccctgagaacagtcctgctgaccagactctgattgttcagtcacagcccgtggaggtcatctatgacgctaaaactatcaatgctgttgttgaattctttcagtcaaataaggggttggatcttgagcaaattacatcagctaccttgatgaaactggaagagattaaagagaggacagctacaggacttacgcatatcattgagactcggaaagttctcgatttaaggataaatctgaagccttcttacctgataattccacagacaggttttcaccatgaaaagtcaaatcttctcattttagattttggtacttttcagctcaacagtaaagaccaaggcgcacagaagactgctaatgcatcccttgaagaaataatagacaaggcgtatgacaagtttgatgtggagataaggagtgtgcagttgctctttgcaaaagcagaggaaaattggaaaaagtgtagattccagcatccatcgactatgcatatactgcagccaatggatattcacgttgagttggccaaggcaatggtggagaaggatgttagaatggccaaatttaaagtgtcaggaggactgcctttgatgcatgtgaggatttctgaccagaagataaaggatgcgctgtgtttgattaacagtatacctttgccacagaagtcatccacaccgtctccagagagacaggtagcctcaattcctgttctttcaggagggacgaaagcacttcttgggacttcattgttgctagatggagtggaatcagagtctgacgaggagttctttgatgctgaggacggagactcgcaggctgctagaactgtcaaagcctcagaactgaaaaaagctgctgaagttccaaatgaggagctggttagtctcctgctcaagtttgagattaaagaggtggttttggaactcactaaacaacagaaagaagaagagacaatcctagtatttaatgtcactcagttagggacagaagcaacaatgaggacatttgacctgactgcggtgtcctatttgaggaaaatcagcttggattaccatgacattaaaggatccagaaagaagccaattcacttgattagctcttcagacagacctggactagatcttttaaaagtggagtacattaaggttgataggaatgggcctagttttcaaactacttttgagaaaactgaacaaactgttaaggtggccttttcatctttgaatctgttgctacaaacgcaagctcttctgtcttctcttaactacttgacaactgtcatcccatcagacagtcagaacacgggtgtggccaaggaggtgcaggccatgcctgagaaacaaaagaactctcccctgcagaaagtgatggtcccctccagagatagtgacgtgattggctttaggctgtttgccaaactgaatgctttctgtgtcactgtctgtgatgagaagagcaatattgctgaaatcaagatacaaggccttgattcttctctttctcttcaatcaaagaagcagtcactttttgccaggctggaaaacattattgtcacagatgttgatcccaaaacaattcataagaaagctgtatccatagttgggaatgaagtttttcgctttaacctggatttgtatccggatgctactgaaggggattcctacactgacatgtccacagtggatggcgtggtggcactgcacgtcggctgtattcagattgtctaccttcataaattccttatgtcgctgctgagcttcctgaacaatttccaggtggccaaggaggcgctgagtgcagccactgcccaggctgcggaaaaggcggccacgagcgtgaaggatctcgcccagagaagcttccgtgtttctgtcgatattgatttgaaagcacccgtcattgtcattccgcagtcctctctctccaccaatgctgttgtggtggatcttgggctaattagagttcacaatcggttcagtctggtgtctggagaagacactgcaaatcctccagtgatcgacaaaatggaggtgcagctcacgaaactgaaactctctaggacagcaatccagccaggcacctcccaccctgatattcagctgttgcacccaattaacttggagttttttgtaagtcggaatctagctgcaaattggtaccataaggtgcctgttgtagaaattaaagggcgtcttgactcaatgaatgttagtctaaatcaagaggatcttaatcttctgtttagaatattggcagaaaatcttggcgaggccactgaagacttggataaagggaaacctagaatacaagagagaggtgaaacaaaagcctgccgagaagtctctacaccgcaggatgtgcacaccacacaaggtgtgccagcagccagagtggaggagaccagacccgtagacatcattaatgtactgttgaactttgaaattaaagaggttgtggttactttgatgaaaaaagcagaaaggaaaggaagcccctttcatgaactaaagatcctgcatcttgggatggaagctaaagtaaaagcccacgacatgactgctgcagcctacctcaggaacattagcatgcggtgtttccacttccctgattctaaaggggagcctctgcgcattgtcaacacctctgatgtgtctgatgggatcctcctgaaactgctgttcatcaaggcagacagtgatggaccagactttaagaccattcatgataacaccaaacagaagctgaaggtttcgttttcatccttggacttggtacttcatttggaagctttactttccctcatggattttttgtcatctgctatcccatcctctgactcttcttcctctgagaaggaacctgagctaaagccacttgtgggggagtccagaagtcttgccatcagagccgtgcccagctcttatgagggtgacgcgtttgatttgaagatcacagctgaattaaatgcctttaacatcttcatttgtgatcagaagagtaacatagcagaaattaaaatacatggaatggatgcctcgatttctgtgaagccaaagcagactgatgtatttgccagacttaagaatatcatagttatgaatgttgattcactgtccattcacaaaaaggctgtctctattttgggagatgaagtcttccggttccagatgagtctgtatccagatgccacagaaggagagaattatggcgatatgtctaaagtggatggcagacttagtctcaaagtgggctgtattcagattgtctatgttcataaattctttatgtctctcttgagcttcctcaacaatttccaagctgccaaggaagccttgagcacagccacagtccaggctgcagagagagctgcgtccagtgtgaaggacctggcccagaagagcttccggcttctgatggacatcgatttgaaagcacctgtcatcactattccccagtcttctgtgtcaccaaatgtcgttatagcagatctgggcttgatcagagttgagaacaagtttagcttggtttctgtggagcagctcgcgcttcccccagtggccgacgagatgagcatccagctcacccagctgaagcttgccagaactgttttacaagctgattcacctcagcatgacgttgaaatcttaaaacctgtgaacatgcttttatgcatacagcggaatttgtcagcagcgtggtacacacagattccaggcatggagataaaaggcgaacttaaacctatgcaggttgctctcagtcaagatgacttgacagttttaatgaaaattttgctggaaaaccttggggaagcttcttcacaaccaagccctacacagtatgcacaggaggctgcacgggtgaagagagatactcggagtgggcctgactatcttaaagaacaagagctggcggacccaaagccgcccggggaccagaccgtcactcttcagtttgatttccactttgactctctttccatcatcctttacaacagtgatagcagccaggagcccaggctttcatttcacaatgacagtttccgtttgggtgagctcacactacacctgatggcttctgctgggaagatgttcaaggatgggtctatgaatgtcagccttaaacttaagacgtgcacgcttgatgatctccgagaaggaatcgagagagccacctccaggatgattgacaaaaagaatgaccaggacaacaacagctctatgattgatataagttatagccaggataaaaatggaagccaggtcgatgctgtccttgacaagctgtacgtgtgtgccagtgtggagtttctgatgaccgtggctgatttcttcatcaaagctatgcctcagagtccagaaaacatagccaaagaaatacagattccatcaagacagactgccgcgggaagagtcaagatggagaaagatgactctgtgaggccaaatatgactctgaaggccatgatcacagacccagaagtggtgtttgttgccagcctgactaaggccgatgctcccgctctcacggcctccttccagtgcaacctctccctctcaacgtccaaactggagcagatgatggaagcttctgtgagagacctgaaagtgctggcctgccctttcctcagagaaaggagaggaaagagcatcaccacggtgttgcaaccttgctccttatttatggaaaagtgcacatgggcttccgggaaacaaaacatcaatattgtggttaaagagtttgtgattaagatctcacctataatccttaatactgtaatgacaatcatggctgctatgtctccaaagaccaaagaagatgaatggaaagacactcctaaggagacagacaatctctgggctgtcaaatctattactgattataactcttggtttctcggggttgacatggcaacagaagtaacagaaaattttagagactctgaacatccatcgatagaggaaaattgtgtggttgctgtggagtcagttcaagtcaccttagagtgtggcctagggcatcgcactgtgcccctgttattggcagagtccaagttctctggaaatattaaaaactggacttctctaatggccgctgctgctgacatgacactagaggttcactattacaatgaaactcatgccgtctgggagccactgattgaaagagtggaggggaacaagccgtggagcttaaagcttaatgtaaagaaaaacccgatccaggataaaagtttgatgccaggagatgactttattcctgagccacaaacagcagttcatatttcttcaggagctacgatgaatatcacaatatccaaaagctgtcttaatgttttcagcaatttagcaaaaggtttctccgagggagcggcttctacgtttgactactctctgaaagacagggctccttttacagtcaaaaatgcgctgggtgtccccatgaaggtgcagcccaatcgtaacctcaaggtcatgggctcccctgagaagagtgacatttatgacgtgggcgctggtcagcacttggagctggactacgccagcctggaaccttcgcgccaagggaagctgtccatcctgagccggcaggagagctcgctcttcacactgacctttgtaccatatggttatacagaagtagctagtgttcctgtcgccaggcctggccgacgattgtataatgtgcggaaccccagtgccagccattcggattccgtgttggtgcagattgacgcaacagaaggcaataaggttgtcactcttcgctcacctctgcagattaaaaaccacttctcaatagcatttatcatctacaaatttgtcaagaatgttaagctgttggagcgcatcggaatagccagacctgaggaagagttccatgttcctctggattcctataggtgccagttgtatgttcagccggctggcggcttggagcagcagtacacacactcctccacctacatttcctggaaggaggagcttcaccgcagcagggaggtcaggtgcatgctgcagtgtcctgcagtggaagtcagcttcctacccctcatcgtgaacacggtcgctctgcccgatgagctgagttacatcggtgcccacggggaagactgggatccagcctacgtcattcatctttaccctcctctcaccttgcggaaccttctcccgtattcgctaagatacttacttgagggaaccgcagaaacccacgagctggcagaaggcagttctgctgacgtccttcactcacggatcagtggcgagatcatagagctcgtcctggtgaaatacctgggcaagaactggaacggacacttccgcatctgtgacacacttcccgagttcttcctcgtgtgcttttcctcagacactgcagaagtgatgacagttgacctgtcagttcacgtcaggcggattggctgccgaatggagctgtctgtctttagtccctattggctaatcaacaaaacttctcgggttctccagtatcgctctgaggagatacatgttaaacacccagctgatttcagggacatcattttattctctttcaagaagaagaacatttttagtaaaaacaaggtacagctaaaaatttcaaccagtgcctggtccaatggtttctcactggacactgtgggcagttacgggtgtgtgaagtgcccggccaccaatatggaatacctggtcggggttagcatcaagatgagcagttttaatctctcacgagtagtcactctgactcccttctgtactgttgcaaataagtcctcgttagacctagaagttggagagattgcttcagatggttccatacccaccaacaaatggcactatgttgcttcgtcagagtgtattccattttggcctgaaaatttgtctggcaaactttgtgtgagagtggtgggctacgaaggctcttccaagccattcttttacaaccgacaagacaacggcactttattgagcttagaggatctgaatggaggcatcctggtggacataaacactgctgaacactcaactgtcataaccttcagtgactatcatgaggggtctgcgcctgctctgataatgaaccacacacagtgggatgtcctcacgtataaacagagtgggtcacaggaggaactagtattgctgccaggagaaactcgactctttgcctgggcagatcccactggcatcaggaaactcacttggaactatgcagctaactttggggagcatgatctcttaaaggatgagtgtggtcagtttccgtacgatgcgaacatccagatacactgggtgtccttccttgatgggcgccagagggttctgcttttcacagatgatgttgctttggtttccaaagcactccaagctgaagaaatggaacaggccgatcacgaagtagccttgtcgctccacagcctcgggctctctctggttaacaatgaaaacaagcaggaagtctcatatgtcggaatcaccagctcaggtgttgtttgggagatgaagccaaaacagaaatggaagccgtttagtcagaagcagataatgtccctggagcaggcctattcgaagcgccttgcatcacaagaccgcggctgggtcaagctggacagtaattttgaggtcaattttgacaaagtgccgatggaaatgcgcctccctatccggtgccctattaaacgggacttcttatcagggattcaggttgagtttaagcagtctcctcaccagagaagcctaagggcccggttgtattggctccaggtcgataatcagttaccaggcacaatgttcccagttgtatttcaccctgtggctcctcctaagtccattgctttggattcagagcccaagcctttcatcgatgtgagtgtaattacgaggttcaatgagtacagtaaagtcttacagttcaagtattttatggttctcatccaggaaatggccttaaaggttgatcagggcttccttggagctgttatttcactgtttactcccacaactgatcctgaggctgaaagaaaacggacaaagttaatccaacaagatattgatgctctcaacacagagttgatggagtcttcaatgactgatatgtcaatcctgagtttctttgaacatttccacatttcccctgttaagttgcatctgagtctgtctttgggatccggaggtgaggaatcagacaaagagaaacaggaaatgattgcaattcattctgtgaacctgctgttgaagagcataggtgccactctgacggacgtggatgacctcatattcaagcttgcttactatgagattcgctatcagttttacaagagagatcagctcatgtggagtgttgtcagacactacagtgaacagttcttgaagcagatgtatgtgcttgtattgggcttagacgtgcttggaaacccatttggactgattaggggcctgtccgaaggagttgaagcactgttctatgagcccttccagggtgctgtccaaggtcctgaagaatttgctgaaggattagtgattggggtgagaagtctcgttggacacacagtaggtggtgcagcgggagtcgtatctcgaatcactgggtcagttgggaaaggcctggccgcaattacaatggacaaagagtatcagcagaagagaagagaggagatggggcgacagcctaaagattttggagacagtcttgccagaggagggaagggcttcctgcgtggagttgttggtggggtgactggaataataacaaagcccgtggaaggtgccaagaaggagggcgctgccggcttctttaaaggaattggaaaagggcttgtgggtgccgtggctcgtccaactggcgggatcatagatatggctagcagcaccttccaaggcattcagagggtagcagaatccactgaggaggtgtccagcctccgtccacctcgtctgatccacgaagacggtatcattcgtccatatgacaggcaggaatcggagggttccgacctattagagaatcacatcaagaagttggagggcgaggcctaccagttccactgtgccgttcccgggaacaagagggctgtccttatgatcacaaacaggcgagcactgtttataaaggaggttgaaatcctaggccatatgtctgtggactggcagtgtctgtttgaagattttgtatgtcctcctgaagtcagtgaaaatctgctgaagatttcagttaaggagcagggtctgttccataaaaaagacagtgccaatataggccatcttcggaaaatttacctgaaggatcccatcacagccaagagggcctttgatgccattgagagcgcccagtcagcaaggcagcagcagaagctcatgaggcagtcgtcagtgaaactcctcaggccccaggggccgtcttgaccatggattctacaaggcttctgagggggaagcggccgctgcagggcctgctcaagagaacatttccagcgattccttggctctgggttttggtgttttgttttgttttttgtttttgactcttaattttgagtcttgggaattctgcatatattaggaatctactgctacacgtttaggtcagacctcaaagaaataccacttcagcttggagagacttattcattaatattaaaattgtgaagcaaagagtggtgggcttgtttttaattaatctttactgaagagaggagattttaaaatgagtagtattctttgaaaggttttattcagacaaatagtggacactgacatttgtttaaaagtaatttgtgcaataattgaactaagagaacacttttggtaagccagtcagttgactgaagaaatgtatctaaaggagaggcagtgcattttctatgttcattttatgaaaatgttatttttcttctaataggatgagttttacacgagtgctttttcttctcctttctatctagtctcagaccatgggcggtctggcagctttggtgggcagccctgcaccgctgtctgtagcgaggcacccaccggctgtcagagcatgagcacaacgacggattcttgagaaatagaaactgagaaattgcactatgagctcctcagcattcaggaatatataaaatacaatatttttttatatttccagagatctattttagaatataaaagactacaaagggcgccataaatgaacatttaattctaatgcatacctgtaaatgtcttttaaatacctgttaggaagaatgaaaaatccctacttactttattgtataggttttcttcaaggtctgtacagagttgggaaacgggtgttccctgtatgcatcaagctgctgtccttcctcgtctccctgaggcttgttaggtcggggctgcctgttggcaggttaggtagaggggcacgggctgcctgttactctgagggattttatttctttgggtggacctttatttagcctttttcagggtgttgaacatggcattgagttaaagcgcacagtcagcgatgagatgaggaaggtatggatgctcatcttgctttgcctttgttgatgcaggtcctccttccaccctcaatgccagtcacgctttcaagattgcacaggaagacttcttagcttcccactgctgcttcatgtttctctaagggagagtgcagaaatcagtatctgatttttagtagttgttagatttttaattcaattccttcatttcttatcctcaccatgccccccatctccaatctccagttccttcctccctccctcccttccttccttccttccttccttccttccttccttccttccttccttcctctctctttctctctctctttctctctctctatctttttctcttcccctccctccctccctc

SEQ ID NO: 151 - DNA, 3204 bp, Mus musculus
gcgggggagcgcggcggcgcctccgccaccaaactcctggggctccgcggcgttcggagccacctcctgcctagcccggaggggctctcttaccaggctgcaacctcactttcccgtttttctttttctttaaaaaacacccccacctctcttctgctcacagcagctggtgcattcccggctctactctccggagctgcccatccctccggctgcgggcgaggacgcgcgctcagccttgggcgaagcaaagaagaaaaacttgtcagaggggtttctccagcctccactaacctccttctctcgggaacaccaaccacccgccggggccagacctaagtctgggaaagttcctccggtgctcagcgccctcttgaatctggaacagcaccggcgcagccagtggaattagatctgttttgaacccagtggagcgcgtcgcgggcgctcggaagtcaccgtctgtgggcgcccgggtggcgctgcctgagaggacccgggagtttgccgaccctactgcaagtgacctttcctcccctcacttggttgattgtgtctcagttgggggctgcgagggtgacaagttgcagtgagagctcccgaagttcggagagggttcagctgtctctccttcacttctgttacccggagtgaaatcctagcgaaactgtcagaggcctccggatcccacccaagactcaccagcagagctcggccgtgtcgccccatccccagggataaccccggagcccagggtctcaagaaaaaattcgttgggcaggggagagaggtcgcggcagcggcatggcaaggttccggagggccgacctggccgcagcaggagttatgttactttgtcactttttaacagaccggttccagttcgcccacggggagcctggacaccataccaatgattggatttatgaagttacaaacgcttttccttggaatgaagagggggtagaagtggactctcaagcatacaaccacaggtggaaaagaaatgtggacccttttaaggcagtagacacaaacagagccagcatgggccaagcctctccagagtccaaagggttcactgacctgctactggatgacggacaggacaataacacccagatagaggaggacacggatcacaattactacatttctcggatatatggtccagcggattctgccagccgggatctgtgggttaacatagaccaaatggaaaaagacaaagtgaagattcacgggatactttccaacactcatcggcaagctgcaagagtgaatctgtccttcgattttccattttatggtcattttctaaatgaagtcactgtggcaactgggggtttcatatatactggagaagttgtacatcgaatgctcacagctacacagtatatagctcctttaatggcaaattttgatcccagtgtatccagaaattcaactgtcagatattttgataatggcacagctcttgttgtccagtgggaccatgtccacctgcaggataattacaacctgggaagcttcacattccaggccacactcctcatggacgggcgcatcatctttggatacaaagaaatccctgtcttggtcacacagataagttctaccaaccatccagtgaaagtcgggttgtctgatgcatttgtcgtggtccacaggatccagcaaatacccaatgttcgaagaagaacaatttatgaatatcaccgagtagaactacaaatgtccaaaattaccaacatctcagctgtggagatgactccacttcccacatgtctccagttcaatggttgtggcccttgtgtgtcctcgcagattggtttcaactgcagttggtgcagcaaacttcaaagatgctccagtggatttgatcgccatcggcaggactgggtggacagtggatgcccggaagaggtacagtcaaaagagaagatgtgtgagaagacagagccaggagagacatctcaaactaccacgacctcccacacgaccaccatgcaattcagggtcctgaccaccaccaggagagctgtgacatctcagatgcctaccagcctgcctacagaagatgacacgaagatagccctacatctcaaagacagtggagcctccacagatgacagtgcagctgagaagaaaggaggaaccctccatgcaggcctcattgttggaattctcatcttggtcctcattatagcagcggccattctggtgacagtgtatatgtatcaccatccaacatcagcagccagcatcttcttcattgagagacgcccaagcagatggccagcaatgaagtttcgaagaggctcaggacaccctgcctatgcagaagttgaaccagttggagagaaagaaggttttattgtatcagagcagtgctaaaattttaggacagagcagcaccagtactggcttacaggtgttaagactaaaactttgcttatgcatttaagacaaacagacacacaacccacaaccacacacaaaggagccctaaactgctgtagacagaagggcgacgagatttggacaagcccagcccaggaacattgaaaggaaaactcagacttgtacaagacaccatgtacaatgattaaagaattccctagtggaatgacatccatggttcacaaggaacatctccggtggacttgccaggagtgtgacgagatgacgatgcttttggtttaggtgcagggttgcaaagaaatcaaggaaaaaaaatatgacaataaataaagctttagttcacaagggatcgacacttttggttcaaatgttcttctctgacgtctcaaagataatcatgttccaaagcctgaacactgtcactgaaaagagcaatggtgaatgtttcaagattgcagggaacaatagctcacacaggagcaaaaccaaacatggatggagggttttctatcttttccaaacagactatcagcagaaggattttatgttttgctctagatgtcattgtgcagacaagttcattactttgtaggatgaatcttttatttttcagaagttcaaactctgcctgcctcttccttggtaatgaataccatttttgtgagctgtgacacaattccctaatgttaagctaagaaccagagaggaaggagtagccagtgaggtttccgttctctcactgaagaataaaatgccttctaaggtgctgcttcctctcct

SEQ ID NO: 152 - DNA, 1081 bp, Mus musculus
ggtctccgaggagagatgggtcctcctggaataccaggccaacctggggaacctggatacgctaaagatggacttccaggaagccctggtcctcaaggagagacaggactagctggacatcctggccctcctggtcctcctggcccacctggcctgtgtgacccctcccagtgtgcgtactttgccagccttgctgcccggccaagtaatgtgaagggcccatagaagattctagatcatcaaaacactactatggatttctgaaacttgaactcggagcccattgggaagccagaagccttgaaacatttcaaatccttcttctctctccccttcctacttcccgccttttcttcctgcttcccctctttctagtcttttctccttgcctgccttaattgtcttttcccgtcctcagagacctcacagttattaaaaccaacagatactgtcagacagtcaggttattattaatattattgttattgtttgctgttatttcaaaggctaatagttttgagggagcttcctggtggacaggaagcagtttcctggctcagctcccctgtcatcactggctgaagtgtgacagccaatttctgaggaaccctcggtgctatgcaaccctgaccatgtatgcacttgttgattttacctctttcctggaaaggaagctttaagggatggagactgtattgttgtttcctcagctgtgcctaaagatggcccagggaaaagtaagtttgaaatccccacctctccagagagacttgaagcaagaagaagaatttgcagcctaaaagaattcattgacctctggagacaaggtgcacatctggagttcagaactgcctcagggcattggggggaaggtggttatccttggtgcttcaggctaccagaactccaaaagaagtcacatagtattggcagtagcttgtgtcagggccctctatgaacaagctggtgctgaagaagagttcccaggtgtgacttcacttctaactgtggcctgaaccccttcaagttcctcatgctggtttcaattgtgtgagttgcaaaataaaagttttcaatggtc

SEQ ID NO: 153 - DNA, 467 bp, Mus musculus
cggggtccctgaaaagcgcggaccaggcgggcgccacccagtccagagcctgcaacctacttccttctagctgcagccacttgtgcaggaccaggtaccgccatgccgaagtgccccaagtgcgacaaggaggtgtatttcgctgagcgagtgacttcactaggcaaggactggcatcgtccctgcctgaagtgtgagaaatgtggaaagacactgacctctgggggtcatgctgagcatgaaggcaagccctactgcaatcatccctgctactccgccatgtttgggcccaaaggctttgggcgaggtggagctgagagccacactttcaagtagaccgaggttgtggaaactctccctgcccgcccaggcacatgccaggccttacccccggacagcagggctctcgggaaccctcagtgcctttaataaacctgatctttggaaaaaaaaaaaaaaaaaaaaaa

SEQ ID NO: 154 - DNA, 3022 bp, Mus musculus
gagtctctcgccgcagcccgtcgagtcggggcgctcgccatgctcccgtgacccggacccggccagttccctttcccgtggcgggcatcccggagtcgcgatcccacaatgccccgggcagtcggggccccggcgggcagcctgcacggccacgtgagaggttggtactaagaagtgcctttcctgacgtctctgctgcttggaaccgcttctagagcagcctctgcttttgccttgcttgctgccagctagactgacgacagcacatccgccctccacctctagcccagacaccccatttctacttctaatcaggagaaaagctctgagtatctgccattgccctaggctgctttagtttagaagaaaagtttgctgaaaaagtaagataccttctgccaggaaatcaaggaggaaaaaaaaaaatcattttctcgattttgctctaaactgctgcatctgtctatgccaaactaatcaataccgattgcaccaccaaactccatcgcaaatcagctgtgaggagattccctgtcagacaactttgctgaaagcagcttggaaattcggtgtcaaagggtctgccacgttttcatgcttgcattttgggctccaaattggcactgggaaggggttactgagcacacggctgagtccaggcctcctctaaacacccatctacttacagtcctggtattcctctcaaaaccaaaacctctttgaattaacagtttcatgctgtgaatttctagcggaggtctttccctttatattgaagtcacacttttccatgtgccgttaaatcggggacgggggaagcagcctttcggacattttcacagttatctcacactctgagttttatcagttcctattttgtttagtttttgtcttttgttttggttgctgattttttttttctatttttctttttctttttcttttctttttttctttttgttttttccttttttttttttggagaggggttgggtttgttggtttcattgaacatttaactacctgtaaaatataaacatggctgttagtgtcacaccaattcgggacacaaaatggctaacactggaagtatgtagagagtttcaaagggggacttgctcacgaccagacacggaatgtaaatttgcacatccttcgaaaagctgccaagttgaaaatggacgagtaatcgcctgctttgattcactgaaagtgagtaaatgttacctccttttaaggatatgcaatgattgattaaggggtatgggtacatggtactctaaatttggaattatgggttgttttgttaacactttagttactcagaatgttctggctcctgaggctggcctggggctctcaactagatctcatagaatcaaacagagccaaactttgttataaataactttgtcaggcctttaactccgaactccatgcctcccctcccctccctttcttttcttttcttctttttttttttttcctaaagcagaattgttacacgttgatgtagttgtgacttagtgatagcaagtcagagtctttgttcagcaatggtaaatgtttacattcaagactttcatatataataaggccaagattgaatgaatatatgttgtatgtctttgttggtaaactttgtcaagctgttataaatgaatggcaaattctgtgtcagctgatcataggtaacatttttactctttttttttttttttaatgagatgattttaatggctaaagccatgtcctttttgggaaaacatgactagaagtgagagttttgtttcagttgctctggtatcttatccaaagcatatactatattagatgtggactttgtaaataggcacaaactcctgtgtcctgttgttcattgggattttcatattgaggcaatgcagatgttcattttctgtgagattcttgccagttgttacttatagtgttctgtcagaaatgttaaaagttagccttgtgtgtgtgataagaagaaatggtttatttatgttagaatttttgacattcaaaaaactgtcattggacttgtaagccctgtatcaggtttcaagtgggtcttgtaaagatagcacacatgtctttgttttgatacaaggtcaaggctagaaatgtgttctggggtgtcttcaacctgcttgatttaatcagattaatttttgaatactaaatgcctacagctaattctttgactcttccaagatgggtcaccatcatatggaagtctgtgaagaagtctcagagacccatcatgtttaaaaccaaaccgtacagtaatccaagtgctttcttacatcacgtcagggtgagttagaagttaaccgtttcagctcactttgtgatgctcgatctggtaaagtttttgccaaatgtttaagatttgattttcagaacaggatgtgaggaggtatgtgttagtaaccacagacctctgttaagatggcatgctatataggcagagtcctagttgaggtgaataaggggaaattaccactttctctcagcttggccttaagggatgcctttattataaaggtgttgatacctttgtgaacattaatcctgaattaatgctcaccaattcaggtgtaatgagagaaggatccataacaggaggagcaaaggactaattgcttttgtcgggaaacagctgtgtccataagtaactcctttttgacccaattcctagtaaatccagtttataatcctatagataattggtggtaaactcctagctcagaaatgaaggacattaaatttggccgtgacattgaatggctttacagaagacctgccggcacagggtttggaaacattgtgaaacattagtattcagttgctatttttccagctccaaatatttttttagttagcgttcacttgtggtcagagaacagttcccctttgaggaaagcaatcgtcctgcttacagacacccagtgtccctaacgagattcaacccccacatcaaggactttaaaacaaacaaacaaagaaaacc

SEQ ID NO: 155 - DNA, 3085 bp, Mus musculus
gttaccattctgatggtggagacgccattttgtggagcggccgaaccttgtaggaggttctggggcgcagagccgctactgctcctgctttgttccctctgtgggggggaaaatttaagccttttgaagcagtgtgctagctcttccgtgagacgatgggttcagacaaaagagtgagtagaacagaacgtagtggaagatatggttccatcatagatagggatgaccgtgatgagcgtgaatctagaagcaggcggcgggactcagattacaaaagatcaagcgatgatcggagaggtgatagatatgatgactatcgggactatgatagtccagagagagagcgtgaaagaaggaacagtgaccggtctgaagatggctatcattcagatggtgactatggagaacatgactatagacatgacatcagtgatgagagagagagcaagaccatcatgctccgtggccttcctatcaccatcaccgagagcgatattcgagaaatgatggagtcctttgaaggccctcagcctgcagatgtgaggctgatgaagaggaaaacaggtgtaagccgtggtttcgccttcgtggagttttatcacttgcaagatgctaccagctggatggaagccaatcagaaaaaattggtgattcaaggaaagcacattgcaatgcattatagcaatcccagacctaaatttgaagattggctttgtaacaagtgctgccttaacaatttcaggaaaagactaaaatgcttccgatgtggagcagacaagtttgactctgaacaggaagtgccccccggaaccacagagtctgctcagtccgtggattactactgtgatactatcattcttcggaacatagctccgcacactgtggtggattccatcatgacagccctatctccctatgcttccttagctgtcaataacattcgcctcataaaagacaaacagacacaacagaacagagggtttgcatttgtgcagctatcttctgcaatggatgcctctcagctgcttcagatattacagagtctccatcctccattgaaaattgatgggaaaactattggagttgattttgcaaaaagtgccagaaaagatttggtccttccagatggtaaccgagtcagcgccttctctgtagctagtacagccattgctgctgctcagtggtcatccactcagtctcaaagtggtgaaggaggcagtgttgactacagttacatgcagccaggccaggatggctacacacagtacactcaatactcacaggattaccagcagttttatcagcagcaagctggagggctggagtctgatacatcagctacatcaggcaccacagtgactaccacctcagcagctgtagtatcccaaagtccccaactctataatcagacctccaacccacctggctctccgactgaggaagcacagcctagcactagcacaagtacacaggcccccgctgcttcccctactggtgtagttcctggtaccaagtatgcagtacctgacacgtctacttatcaatatgatgaatcatcaggatattattatgatcctacaacagggctctactatgaccctaactcacagtactactataactccttaacacagcagtacttgtactgggatggcgagaaggagacctacgtgccagctgcagaggctagctcgaaccagcagactggcctgccttccacaaaagagggaaaggagaagaaagaaaagcccaagagcaaaactgctcagcagattgccaaagacatggaacgctgggccaagagtttaaataagcagaaagaaaattttaaaaacagctttcaacctgtcaattcattgagagaagaagaaaggagagaatctgccgcagcagatgctggctttgctctttttgagaagaagggagccttagctgaaaggcagcaactcctccctgaattggtgcgcaatggagatgaagaaaacccccttaaaagaggtctggttgctgcttacagtggtgacagtgacaatgaggaggagctggtagagagacttgagagtgaggaagagaaactagctgactggaagaagatggcctgcctgctgtgccgacgtcagttcccaaacagagatgccctggtcaggcaccagcagctctccgacttacacaagcaaaatatggacatctaccgaagatccaggctgagcgagcaggagttggaagccttggagctgagggagagagagatgaaatacagagaccgagcagcagaaagacgagagaaatacggaattccagagcccccagagcccaagcgcaagaagcagtttgatgctggcactgtgaattacgagcagcccaccaaagatggcattgaccacagtaacattggcaacaagatgctgcaggctatgggttggcgggaaggctcaggcttaggaagaaagtgtcaaggcatcacagctcccattgaggctcaagtccgactaaaaggagctggcttgggagccaaaggcagtgcctatgggttgtcaggtgccgattcctacaaagatgctgttcggaaagccatgtttgcccggttcactgagatggagtgaaactggggaagcaatgctgagcacagggagcaagccatctcctcagttgctcttactgcctgtctctaagggcatgccttgtgctattaatagttttaggatgaaccacttcattctgaggggttctcctaccttaaatgagctcccttacgtgggtaaacaaccttccttcccacctgagggactgtgaacagaggggacaatgggctttttatactaaggtgtatatagtgtaaatgtaatgagttttacatgttgtagcctgtgttgtgtccctacttcctgggggcttgagaagctcggagtggttgtcaacaccaaagccaccactgtcatttattgttgttatgtcttttcttggcaatagccttgtgtatatttgtatattatacatttgtacagaattttggaagattttcagtctagctgccacgtctggctcctttacaaaagaaataccttcaaaaaaaaaaaaaaaaaaa

SEQ ID NO: 156 - DNA, 3037 bp, Mus musculus
gactcactttgcccgggtcccgggaggccgtcgacttatcctaggagctcggagcttttcttctgggcaaccagggcgcttccagacagagttcctgctgccacccaccacccccctctcagcacaggacaaggatggagctccattttggctcctgcctctccggctgtttggctctgcttgtcttgctgccttccctgagcctagcacagtacgagggctggccctaccagctccagtaccctgagtacttccagcagcccgctcctgagcaccatcagcggcaggtgccctccgatgtggtcaagatccaggtccgcctggcgggccagaagaggaagcacaatgagggccgcgtggaggtctactacgaaggccagtggggcacggtgtgcgacgatgacttctcgatccatgccgcccatgtggtctgccggcaagtgggctatgtagaggccaagtcctgggctgccagctcctcctacggtccaggcgaaggccccatctggttggacaatatctactgtactggcaaagagtcgaccctggcatcttgctcctccaatggctggggtgtcactgactgcaagcacactgaagacgttggagtggtgtgtagtgagaaaagaattcctggcttcaaatttgacaattcgttgatcaaccaaatagagagcctaaatatacaggtggaagacatccggattcggcccatcctttctgcctttcgccatcgcaagcctgtgacagagggctacgtggaggtgaaggagggcaaggcttggaagcagatctgcaacaaacactggacagccaagaattcccacgtggtctgtggcatgttcggcttccctgcagagaagacctacaaccccaaagcctataaaacctttgcctcgcggaggaagctgcgttactggaagttttctatgaactgcacgggcactgaagcgcatatctccagctgcaagctgggcccttccgtgacccgggaccctgtgaagaacgccacctgtgagaacgggcagccagctgtggtcagttgtgtgcctagccagatcttcagccccgatggaccctcaaggttccgggaagcctacaagccagagcaacccttggtgcgcctgagaggtggagcccaggtcggggagggccgagtggaggtgctgaagaatggagaatggggaaccatctgcgatgacaagtgggacctggtatctgccagtgtggtctgccgagagctgggctttgggaccgctaaagaggccatcacaggctccagactagggcaagggattgggcccatccatctcaatgaagtccagtgcacagggactgagaagtccatcatagactgcaaattcaacacagagtctcaaggctgcaaccatgaagaagatgccggggtgcgatgcaacatccccatcatgggtttccagaaaaaggtgcgcctgaatggaggccgcaatccttatgagggccgagtggaggtgctaacagagagaaatgggtcccttgtttgggggactgtatgcggccagaactggggcattgtggaagccatggtggtctgccggcagctaggcctgggctttgccagcaatgcctttcaggagacctggtactggcatggaaatatcttcgccaacaacgtggtcatgagtggagtgaagtgctcaggaacggagctgtccctagcacactgccgccatgacgaggaggtggcctgccccgagggcggggtgcggtttggtgctggagtcgcctgctcggaaactgcacctgacctggtgcttaatgctgagattgtccagcagactgcctacctggaggacaggcccatgtccttgctgcagtgtgccatggaggagaactgcctctccgcctccgctgtgcacaccgaccccaccagaggccaccggcgccttttacgcttctcctcccagatccacaacaatggccagtctgacttccgccccaagaatggccgccatgcgtggatttggcacgactgccacaggcactaccacagcatggaagtcttcacttactatgacctgctgagcctcaacggcaccaaggtggctgagggccacaaggccagcttctgcctggaggacactgagtgtgagggagacattcagaagagttacgagtgtgccaactttggagaacaaggcatcaccatgggctgctgggacatgtaccgtcatgacattgactgccagtggatagacatcaccgatgtgccccctggagactacctgttccaggttgtcattaaccccaactatgaagtgccagaatcagatttctctaacaacatcatgaagtgcaggagccgctatgatggctaccgcatctggatgtacaactgtcacgtaggtggagccttcagtgaggagacagaacagaagttcgaacacttcagtggacttctaaataaccagctctctgtacagtaaagaagatcctgggccaggcatgatggctcatgcctgtaatccctgcactcatgctgaggcaggaggattgccacaagatttccactctggacattaaaccaagcttcagtttcaaaagaaatgaatgaaagaaaggaaggaaggaaggaaggaaggaaggaaggaaggaaggaaggaagaaaggggaaagggaaagggaagaaaaatgacttaatggtcacttactgactcctgggggaatactgattaccacctcttttctagccagatccagctgagaagaaaggtgctcattcactccccagacactgccgtgtgtccctgtcctgaggccttaggggcagggctcgggcacatggccatggaaacttgatgacaagcttagagcagcttatcccatccgagctttggcatgtcccaagtgtgacatcatctgtgctctgcacagaggggccgttttcttctgggaacacagcaggcatgaactcagcaactgcagaggtgatcgggctgaactccgtttttccccttcttaggtcatttctggaaaacttgaatatcaagacctctgt

SEQ ID NO: 157 - DNA, 5649 bp, Mus musculus
cgcgcctctagctgccctggttaccgttggtgtttgcgaattctctgtggcgcctgttccgccccggacgggccccgcggcggttttcacacgcgcgcgccggcgtcacgtgggccagggctcccacgcggacgcaggccagctgctgaggcgggaggaaggcgttgcggctaccgctagcccttccctctccgccccagggctggcgcgcggataaaaaaaaatggcgaaatgcggggtagccggtggggaacccgacgggatggggcgcggaggtggcactgttgtgggagcctgctgaggtgagcgcagctgacctggcgacctcgggccggcgcctgacagcgcagacacggactccgagggtcgccgagggccccgccgagagccggaggcaatggatgagcagagtgtggagagcattgctgaggttttccgatgtttcatttgtatggagaaattgcgggatgctcgactgtgtcctcattgctccaagctctgttgtttcagctgtattaggcgctggctgacagagcaaagagctcagtgtcctcactgtcgtgctccactccagctacgggaactggtgaactgtcgttgggcggaagaagtgacacagcagcttgacactctccagctgtgtagtctcaccaaacatgaagaaaatgagaaagacaaatgtgaaaatcaccatgaaaaacttagtgtgttttgctggacttgtaagaagtgtatctgccatcagtgtgcactttggggaggaatgcatggtggacacacgtttaaacctttggcagaaatttatgaacaacatgtcactaaagtgaatgaagaggtagccaaacttcgtcgacgtctcatggagctgatcagcttagttcaagaagtggaaagaaatgtagaagctgtaagaaatgcaaaggacgagcgtgttcgggaaattaggaatgcggtagagatgatgattgcacgactagatacacagctgaagaataagctcataactctcatgggtcagaagacatctcttactcaagaaacggagctgttggaatctttacttcaggaggtagaacatcagttgcggtcttgcagtaagagcgagctgatctccaagagctcagagatcctaatgatgttccagcaagttcaccgaaagcccatggcatcctttgtcaccacacctgtcccaccagactttaccagtgaattggtaccatcctatgattcagctacttttgttttagagaacttcagcactttgcggcagagagcagatcctgtttacagtccgcctcttcaagtttcaggactttgttggaggttaaaagtttacccagatggaaatggagttgtacgtggctattatttatctgtatttttggaactatcggctggcttgcctgaaacttccaagtatgaatatcgtgtagaaatggttcaccagtcgtgcaatgatcctacaaaaaatatcattcgagaatttgcatctgactttgaagttggagagtgctggggctacaataggttttttcgtttggatttacttgcaaacgaaggatacttgaaccgacaaaatgatacagtgattttaaggtttcaggtgcgctcaccaacattttttcaaaaatgccgggatcagcactggtatattactcagttggaagctgcacagactggttatatccaacaaataaacaatcttaaagagagactgactattgagctgtcccgaactcagaaatccagagatctgtcaccaccagataatcatcttagccctcaaaatgatgattctcctgagacacgaactaagaaagctgggtcatgctctgacatgcttctggaaggcggtcctacttgcgcttctgtacgagagaccaaggaagatgaagatgaggaggagaagattcagaatgaagactatcatcatgagctctcggatggagatctggacctggatcttgttggagaagatgaagtgaatcaccttgatggcagcagctcttctgctagttctacagcaacaagcaacacagaagaaaacgatattgatgaggagaccatgtctggggaaaatgatgtagaatataacagtatggagctggaagagggagagctcatggaagatgcagctgctgcaggtcctccaggtagtagccacagctatgtgggtgccagtagcagaatgtcaagaagaacacatttatgctctgcagctaccagtagcttactagacattgatcctttaatcttaatacatttattggatcttaaggaccggagcagtatggaaaacctgtggggtttacagcctcgcccgtctgcttcactgttgcagcccacagcatcatattctcgaaaagataaagatcaaaggaagcagcaagcgatgtggcgtgtgccctctgacctaaagatgctgaaaaggctcaaaacacagatggctgaagtccggtgtatgaagactgatgtgaagactacgctgtcagatataaagggcagcagtgttgcttccacagacatgcagacaaacctattctgtgctgaccaggcagctctgactacctgtggacccgaaaactctggtagattacaggatttgggaatggagcttctagcaaagtcatcagtggctggctgttacatacgaaaccccacaaataagaagaattcccccaagtcagctcgggccatagcaggcagtctgtcactccgaagagctgtggactctggagaaaatagccgttcaaagggagactgtcaggttctggctgaaggctcctcgggaagctctcagtctgggagcagacacagctccccccgggctctgacacacggcatcattggggatcttctgcccaaaagtgaagaccgacagtgcaaagccttggattctgacgctgtggttgttgcagttttcaatggtttacctactgttgagaagagaaggaaaatggtcaccttggggactaatgcaaaaggaggtcgtctggaaggaatgcagatggcagatttggaaagtcattctgaagctggggaggtacagcccacactacctgaaggagcctcagccgcccctgaggaaggaatgagtagtgacagcgacattgaatgtgacactgagaacgaggagcaggaagaacacaccagcatgggcgcgttcaacgatccgttcctggctcagccccccgatgaagattcacattccagttttcctgatggtgaacaaatagaccctgaaaatctccacttcaaccctgatgaaggaggtggaaggtaattgccagacatgagagccgagctacaagctacctggtccctgaaatttgttggaaattggtgctcaaaattgtcagcagtcagataatcagacttatttagtcccatttctttttgtcatctctacctgaaatagcagttctgaaactattagaaggcacacaattccagcagggtgcagtagtatatgtggaaaagattaaggcaaaagagttctttccaatataatgaactaacagtgtagtgctcaattaatttagcaaattagtacattaacaaaggcagcttgtctactgtaacagaaagccagctaagtgccagaaagtacctggaggcattgcatgatctgatctggctcagcatcggtgcgcttctgtctttgactgacacatggtttagatggccatggttaggtttttcattaggctgtgatttcattaaggcttgtataatagtgaaaaggaagagtgcttataaacagactttgctcagtggacacttttcctgagtaactgcagcaatgttagacagactcttttctttgaaatatgacgatagaccaaattttatgtttttctcacttgttcaagtattggcataccgggtaatggcaccccttctctcagttatgtgacctttacaggtgtcgtttcaaatgagctcagtcattggggattggttctatgcatggtcatttggacgcatgtaagattacttaaagttgttcatcttttctgcttcctgaaacataactatagtgcaacaaatatttttgaacaatatatttccattggttggaccttgatctcagtgagtgcatctaaagatttatgcatatacatgaagctgtgttcaaggctttcttgcatattcccaattagtccaaaccccaaatgattgccaaattttgctactgtgctcctgtgtttgtgtttgagctgttgtatgtttgtaaatgtcacacttaaagctggccaagagactgttgaagaagcgtggatgtgcataggagagcaccccccccacctgcatgtacttagtgcctcctctgtgtcccatggtgatagcttgcttgctgaatgctgtgactcatagtttactgttctcttaacagcttgcacttttcgttaataaaattaacttgagaaaatgtgcctctgcagtttattcaaagtgggaccagaagcaccactccccctcttaaattttttgctgtggctgtttagcagtgtagacaaggacattttcttatggcattgggctaataatcattccttttaaaaccaaaagatttcttcataaataataaaatatatggaaagaataattcttactccaatccctagctatcttatattctaaaatgtccaacaagtaggtggcattttacttttggtattttgactcttctggggaagaggctcagagcccttgcatgctaggcaagcatgttactcctgagctaaagttgtccgggatacccagtgtttcgatgatggcaggagctgcactatggccaccttggctgtgcttgaaggcaggtggggagaagggcagaggcatgatggtagaatcccttgctgtgtctgcttgccctgggctcttacactgtgtatcagattctcccctaataatccatctttcctgcatcgctttatagaaacaaaacaaaagaccttttctctttttcgttggtcataattttttattagtttttctgttgtactttattcagcataaggtgtgtttgttttgtgtgcatgtgtgtgcgcatgtgtttacgcatgtacacgatagaggtcagaggacaccttaggtgccattcctgggtagccatctactttcattttacttgaaaccttccttaaatacctagttatttatcttaggggtttttaaatttttatttatgtgtatgtgcatgggtgtctgaggccacagctgcacctgatgctcaggtgcagggaattccgctcacaaagcctctggaaagcttgagaacccagccaccacctctctaaccctggcttgccttctttttccttcccgttctttctttttgtggcagggtctcactatgtagccctggctggcctagaattctctttgtagacgaggctgcctctgccttttcatttcatgtgctggggttaaaggtgtgaatgtgagcatattgtttttgaacaattctgacaacttgattgtattcttcagtaatctttgagatggacaagttgtgtattgttcccacttggcaaatttggggagactgtgctgctctaaggttggacaccatgcttttttcagttcattatgcttaaccaaacaccaataaaaagctgaacaattaaaaaaaaaaaaaaaaaa

SEQ ID NO: 158 - DNA, 1660 bp, Mus musculus
caggaggacgcgccgcgctccccgcggccgccgcgcgcgttccagggctccggaggtgacgggcacaatgctttgggtcctggtgggggccgtcctccctgtcatgttgctggctgccccgccacctatcaacaagctggccctgtttccggacaagagtgcctggtgtgaagccaagaacatcacgcagattgtgggccacagcggctgtgaggccaagtctatccagaacagggcgtgcctaggacaatgcttcagttacagcgtccccaacaccttcccgcagtccacagagtccctggtgcactgtgactcctgcatgccggcccagtccatgtgggagattgtgaccttggagtgccctgaccacgaggaggtgcccagggtggacaagctggtagagaagattgtacactgcagctgccaggcttgcggcaaggagcccagtcacgagggcctgaacgtctatgtgcagggtgaagacagcccgggctcccagcctggaccacactcccacgcccatccccaccctgggggccagacccctgagcccgaagagcctcctggagcccctcaggttgaggaagagggggctgaggactgagggcccccaactcttcctcccctcttgttccctgtggaatgtcgggttcccaccctccagggaagagggaggggataggcagaagccccccctccccctttggcactggatggacttggaatgctgcctggttgtcatggagatctgaagggaggggctggagccaagctgcacaatttaatatatgcaagatgggggaggaagcagacagacatccgcaggacttttcttttggaaggtgaagtgtggtctttcctttcggccttctagagagatgagccccccacccccacccgggatagagaggaaatgggctgagctgctgaggatgagtgagatcctcaaacagggcaggcccaggccaggacccacacaactgatgggggcaggatccccagtggatgggtccagagtgggaatcaagtcctttgctgaaggacctatgtgggaagaccgcttgcagaggtcggaagctccagtcccataggtttccctaacgacctccctcactccccagtgccagggaagtaaccccttcaatggagtggcttaggagtcaggctggggcaggaccctgctgactcaagtgcagagtgtcactgaagaagaaagaagatccctcccatctctccctctggagatcttagctctctgctccccgtgttctggaccctttaggaaagtagctgcagccagccctgctgtctttggggccggtctttctgaaagaggtgatggtccatctccatcacctgggaccatagtggacaggaggcccctgcatagggcccccactgacctcagctttctctagctccctagtctagccactcctccttcccagctgcactttaaccctagggcagggcaggtggcaaggaagggccctctgtcccctgatatgctggtaccattgtttgtgtccaggggatgccagctcacctccctgggggtgccccggcccgtggctgttcgacgagagccttagagcttgtaactagtagccatctcccctggacccgagtgttttcatgaataaataccttcaatgcctct

SEQ ID NO: 159 - DNA, 6327 bp, Mus musculus
gatgtgtgaaaggaaaccccgaccgtgcctgccggctttacatctgttgctctgacctgactcaaggcatcccaaggaggatgtctgtcatcttggcttgactgaatcccccagcaactcgccccagacagcttgtagaacctgaccactcatgcagagggggaaagaacatgggctaatcaccagagcaggatggacaagagcagggtgagagaggagccaacaaccggagacccttctcagaagacagctaacactcagagaggacccaggagcccaggctctggtggctttctgattctagagggcagtgggtcttataaatgctacgttagcatatagacgttagcaaacgtctggtgggataagaggtgcaggtggatggcaaaaagccttttagctggaatgaacagcccaggttcagtttcgagcttgaaggtacctggatagcaaggaggaagcaaacttgatcaggacctgttgcttcgtggcgagtggctgcgacatgctcccgaggaagcgacccaggagtggacgttccaggcttcagttcctcctactcttcctgactctgggatgtgtcctgatgatggtgatcctgctgcatcctcccccgcccaccctgcaccaggctgtcacagctcaggccagcaaacacagccctgacacggggtaccgcctggactttggagactctcaggagtgggtcctggaggctgagactgaaggtgatgagtacagtctcttggatggcctgccatccttcatctccctgcaggaggatcaactgctggtggccgtggcctcacccagagctaggaggagtcagagccagggcaggagacagggcagctaccagttcatcaaacacaggagcaggagatgggatgaggaagccctggaaaaggactggaggaccgaagaggatggggaggaatcagaagaggtgctgaccccacttggcccggactcagatggcctcaacaagccactcagtgcccgcctgcccctgaggagagtcctgcccgaggtgcgacacccactgtgtctgcagcagcaccctacaagtggcctgcctacagccagcgtcatcctctgcttccatgatgaggcctggcccacgctcttgagaactgtccacagcatcctggacacagcacccagggccctgctgcaggagatcatccttgtagatgacctcagccagcaagaactgctgaagtctgctctcagtgaatatgtggccaggctggaggctgtgaagttgctcaggagcaataggaggctcggcaccattggagcccggatgctgggggccaccagggccacaggggacgtgctggtcttcatggatgcccactgtgagtgccaccctggttggctggagcccctcctcagcagaatagctgatgacaggagccgagtggtgtctccagtcatagacgtgattgactggaagacgcttcagtactccgcatccaagctgcatcgagggacgctggattggaagctggatttccgatggaagcccctgggggagcaggagcagaaggccctcccatcccccatcagccctgtcaggagccctgtggtaccccgagaggtggtggccgtggacagacattacttccaaaacaccggagcatacgatccccttctgtcactgggggatagtgaaaatctcgagatgtctttcaaggcctggctctgcggtggctctgttgaaatccttccctgctctcgagtgggacacatctaccgaagccaagatgccagctccaggcctgaccccgaggtcgccttgaagaacaagatcatcattgctgagacctggctatcatccttcaaggaaaccttctacaggcacatcccagaggccttcaccctgagcaaggttgcaaagccagactgtacagagcgcctgaagctgcaaaggaggctgggatgccggacgttccactggtttctggccaatgtctaccctgagctgtacccatctgatcacaggcccaggttctctggaaagctccacaacactggatttggcctctgtgcggactgccaagcagacggtgacatcctgggctgccccatgacactggctccttgcagtaacaaccggcagcaacagaacctggagcacaccggcaggaaggagattctcttcggcggcccacagcgcctgtgcttcgatgtcagaggagggcgggtgattctgcagaactgcacggaggaaggccccgctatccatcagcagcactgggacttccaggaggatggaatgatcatccatgttctttctggaaaatgcatggaagctggggtccagccaagcaataaggacttgtacttgcgtcaatgtgatggtaaaaccagccagctgtggaggttcgaccagatccaccctgtggatgaacgatgaacgaccttgacagagagcaaagaaaggctgggcatcacattctctgctcctgtatgtcctgagccagcccctagtgtctgggcttctggagtagaagagaagagagtactgtcaaaacaatcaaacaaacaacaaaaacaaaaacatagaagctctctccaggtaccttaccacattgattgtagactggtttttgttgtttggtatgatttctcgagacagggttctgtggctgtcctgaaactcactctgtagaccaagctggccttgaactcagaaatctgcctgcctctgcctccccagtgctgggactaagagagccaccaccacctggctatgttggctgggttttgttttgtttgtttgttttttaagaagaaaaacaatgggttgttcattgtcttcatcaccagaagtgatcattatgaggaaggcaaagtctccccctgccccctccccacaccccgcccacactgagcacttgacatttgcttttatccctgactgtgcgaagaggccccggcattgtctggcagcacctctgggagacatcaaatccagtaggtgaatttcccgaagcccttactcggagagtggatgtggccagctgtggaagttaacatgagggccgtgctatggcctggcagtccccaccttctgactccactcactagcatacatttcatgtccgttcgttgaccccaagctcaaaaggaagcagagggggacaaggaggaatggggtggggctgggaagaagacagcagagagatttggtccaaccgtccagctcagcactgccccctgaagagtcagcagacctggttaaggcattttcatcttcgggacagcctccttgagactttctacctccattcacctgctcttagctcttttctagatcacaaccagatttccctgcagtgtattctttcttggatcaccagtgctggaagggtcaacacatctgagcatgctcatgaacaaaggtattacaggagacaaagtcttttaatgcccgcttaggagagtcgtgttggcttgatgagaaatagcaacttttgaaagggggaaacccaaaatctttacaaggcaaaatagatctggctattaaatgtccctgaggtttgactggctacctatgagccgataacaattgttcaagaccccctacatgtggcttccagttaaatgttcacatggttgaaggaactccacctcaaccagagaagaacctagactcagccacgggagttgctgagtagagtaggctgctgctgagaaaaaaactcttgcccatttctttctgaatggaaatagctttctatcccacccaagatgtgtttgtcctctgggctgtctctaaattcagttgtttcaaataagaactggagaagacatgtgggtaacatgagtaatatctgttacttctccaacttccaagtcaatgcctgatgtttctctagccttagaggcactccggattaacaccatctaatagcatggccacaaccccagtgtggccattttgttggaaattcaccacaattctggaaattttcaaattgttccttgattgtactggttctttatagccattgtactatggcaaatggctactgaacctgagaacacagttataaaatagccaaccatcaccaacagtagccctgaatagcactagatagattcagcccctacttagggaagagttttagccaccatcttcttgcttcggactggtctatatctaaaacaaactcttctaacatgatgaggctgggatggagctaaaagttttcagatgacaaccttgtaaagggcagtaatggctaaagagtacttttcaagatttttattttgaaatgaacgctattattagcattgtgagtagctgaaattgttgggataaattaatatagctaaatgaaagactacattgtgttgtgtgtgttctggtgattaacaaacagacccagatggctcactgcttaattgttttaacaaaacaagaatgtgctatttgttgctccttaactgtccccgtgatttattattttattacagaaatggccatcacctcagtccctgactggtacttacaaacccctaatttaaacagtacagacacttctacttgcttctgaaaaacaatccccttacagtttaactagtgtagtgaattcttatcagtagtcggtttagaagaagagaaacttggcagtgaattgatctgattcctgatttgattttgcttgtctgtctgaattttatgactcttcaaaacaggaattgtttttgtgatctgtctcacaaagcccacccccattaagggggtgttaaggatcctgttggagtgggcggagagaaacaagcaccagctgactccgggccatactctttttgctgtgacaacagatgtcaatccagaagggccatgatgtggtcctcttctgccttgatgtcataaacctgtagcaaagtcagagttccaccttccatgtacatctggaaggtcccagcacccatcatggtgctgcctcagaccaggacgcaacagctctaaggttatatcgccacacttgccttgaaggagctccattttcaactgacgtgccatgaggacgctagttgaacacgaaatgacccaccaaatccagaaatgcaaactggctgcccttggaaggggctctggaagagtaaacatgcagctgagagttgagcaaacagggaaacggcagatggctcaggggttacggagcacacactgctcttacagaggacctgagctctgttctcagtaccaacacagggcaactcacagccatctttcattccatacgctcttctttggcatatgtatatacccatctcacagacatgcaaacatatacataattaaaaataaaatacattttaaaaatcttttaatagggtagtgggagggggcagagaagcacaaagcagacaggtcaaacccactgcagctgaggcttaaaaaagactttgagcttttctaaagtgtgacctttatgaccaggaaggaactgcagctcgcattccctccagcacaggccattagcacattacctgtagctgacggctacatttacatacagcccccaagaacctgagctgctgttttgaaagtcttggcctttccggatgcatctctgacatcctacaggtacaagaggtatcctgaagcagccagggtgcaggagtatcatccatccaccctgtaatctccagctctggtcacatgactatcatgtgactattgtgagagatgtttgttcctgccacaggattcatccctttctcccatctaattggactgggagaacacctggtccatgttgggccaatcaacacattcgcatggattcgtcactaagaaatgagtctctacgggtgacttgagagtcaatatgcaaatttataagtctttggcagccttagtttcttcttatggccctaggacagagaattagagcagagaggaagatgggggtagacctcctggcttacacagagagggtggtgcaaaccaagactgagttgggaaacggagggggcaaaaatctgggcaggctgggtgaacaccagtgaaactgagtattttgagcaaagctgaagtgacagaggagcaggaagaactagtgttccttccccacaccaatgaatgctacaaatcaggataaagcgcttcagagaatcagtactataaagttatgtcagactgtggacaagggtcgggttgggaactcttctgtgccaggccagtatcttgttggtgggaccatggtctcttgaaaatactcagccatgcactgctgtgcagaaagggccacggatggaagcaaacaagcgatcagagttatgttttaataaaactttgtttgc

SEQ ID NO: 160 - DNA, 15865 bp, Mus musculus
attgagttcggaggggtcttttccagcctctctctttcctccttgcatctacaattatggctccacctccacttgggtaatcgcacctccgccctgcagcgcagctcggggtgcacggtgcggggaggtgggcgtcggtgtggagcaagccgcgcccctctgccctcctcctctcggcgaggggcgggcgcgagaaagtggcagcagcgccccccgcgccgccttccgcgcggagctctggaagcgcctgcagcagccgggcggcgtggtgcggtgcggctgcagcgcccccgagtcccggagctcctgcagggccgcacaaagtttgcaaccagcggccctgcaccgcccagctccccgagcgctgctgtagcccggcccggcgtgttcgcggggacccgcctcggccgatgctacacggacagacgggggcgtgccgagagaactttgaaaagctgccgaggaggaacctgctcctgcagctcgccagttggggacctccggaggaactggtctagcccgaggcaatgctgcggaatcccagcagccgctgacctgcaactttcctgctagtcttggcggcgatctgagctttgcctcctcctcgcagcctcggctcacgttggtggccgctctgctggagaacccagtgagcctcggggctgactgagtgttactgtcggccgcatccttctgcggtccacccggccaacctcggctcccggcccagcagccagcgcttccccagtgtctgtgcgtcccggttcccggcgccggcgccacagcctgaggtttggcagagagcaggttcttggatgctgaaggctgggatcttcctgcgagagtgccgcggcggcgatgggtgtcctcaaagcgtggctcggggtggccctagcgctggcggaatttgcagtattgcctcattgtgaaggtgcttgtctgtatcagggctccttccttgcggatgctacaatttggaagcctgattcatgccagaactgtcgttgccatggtgatattgtgatctgcaaacctgttgtttgcaaaaaccctcggtgtgcctttgagaagggagaagtgctgtggattgcccccaaccagtgctgcccacagtgtgcacccaggactcctggctcttgtcaccatgagggaaagatccatgagcatggcacagagtgggcttcagctccatgtactgtgtgctcttgtacacatggagaggtgagatgctcacaccaacaatgcaccccattatcatgtggaccacaggagctggaattccttgctgaaggacgctgctgccctatctgtgtgggcactgggaaaccctgttcctacgatggccatgtgtttcaagatggagaggattggcaactgagccgctgtgccaagtgtgtatgcagaaacgggctcactcaatgctttgccgctcagtgccagcctctgttttgtaaccaggatgaaattgttgtccgagtccctggaaaatgctgctctcagtgctcagcgagatcctgctctacagctggccaagtgtacgagcatggtgaacagtggaaagaagatgcctgtaccctgtgtatgtgtgaccagggacaggtcaggtgtcacaagcaggtgtgccctccactgagatgtgcaaagggtcaaggccgagcccggcatcatgggcagtgctgtgaggaatgtgcgactcctgacaggagctgctcatctggtggggtcctgcggtaccaggatgaaatgtggaagggctcggcctgtgagttctgcatgtgcgaccaaggccaagtgacctgccagacaggagagtgtgccaaggtggcctgtgccctgggtgaagaattagttcacttagaaggaaaatgctgcccagaatgcatttcaaggaatggttattgtatttatgaacagaaggcagagactatgtcttcaagtgcaagagaaattaagcatgttccagatggggagaagtgggaagaaggcccttgcaagctgtgtgagtgccgggaggctcaagttacttgctatgaaccgtcttgcccgccatgtccagtggccaccctagccctagtggtaaagggacaatgctgtccagactgcacaccagtacactgccacccagactgcctgacctgctctcattctccagaccactgtgacctctgccaggatcccacaaagctgctgcagaatgggcgatgtgtgcacagctgtggcctgggcttttaccaagcaggcagtctttgtttagcctgtcagccccagtgctccacatgcaccaatggcctggagtgttcatcttgcctgcctcccctgctgatgcagcagggacagtgtgtgtccacctgtggggatggtttctaccaagatcaccattcatgtgcagtctgtcatgagtcctgtgcaggttgctggggtcccacagagaagcactgtatggcctgcagagacccactgcaagtgctgagagatagcagctgtgagaacacctgtggcaatggcttctacaacaggcaggggacctgcgttgcgtgtgaccagtcctgtaagagctgtggccctagtagtcccagatgtcttagctgtgctgagaagacaatcttgcatgatgggaagtgcatttctgaatgccctcatggctactatgctgattctactggaagctgcaaagtttgccactcatcctgtgccagctgctctggacctacagctgctcactgtatagcctgtatccatccccagacacttcgtcaaggccactgtctgccaagctgtggagaaggcttctaccctgaccatgggatctgtgaagcctgccatgcctcctgccacacatgtgtggggccccagccttctcactgtacccagtgtaagaagccagaggcaggactactggtggaacagcactcaggggaaaatgtcccctatggcaagtgtgtgtcccggtgtggaacccacttttacttggagagcactggactgtgtgaagtttgccacccatcctgcctcacgtgtgaaggaaagagccctcacaactgcacgggctgtgaatccacccacgcactactggctgggtgctgcgtctcccagtgtcccgagacccactttaacctggaaggtacttgtacagaatgtcacccgtcctgcaggcagtgccatggtcctctggaatcagactgtgtctcctgccaccctcaccttactctcaccagtgggcactgtaagaccagctgcaaggaagagcaattcctgaacctcgtcgggtactgtgctgactgccatcctctgtgccagcactgtgtggccaatctccaagacactggtagtatctgcctaaagtgccagcatgcccgccacctgctgcttggagatcactgtgtgccagaatgccctcctggacactataaagagagaggcacttgtaaaacatgccattcctcctgcagaagctgccagaatggaggacctttctcctgctcctcttgtgacactggtctggttctgacccacattggtacctgtagcaccgcctgcttccctgggcattacctggatgataaccaagtttgccagccatgcaacaggcattgcagaagctgtgattcacagggcagctgcacctcctgccgagatccaagcaaggtcctgctctttggggaatgccagtatgagagctgcaccccccagtactaccttgacatcgccacgaagacttgcaaagagtgtgactggagttgcaacgcctgtactgggcctcttcgaacagactgtctgcagtgcatggacggctatgttctccaggatggtgtgtgtgtggagcagtgctcaccacaacactaccgggactccggctcctgcaagcgctgtgacagccactgtgttgagtgccagggtccccatgagtgcacacgctgtgaagagccctttctcttcttccaagcccagtgtgtccaagaatgtgggaaaggatactttgcagatcatgccaagcacagatgcatagcctgccctcagggatgcttgcggtgcagccacaaagatcagtgtcacttatgcgaccacagtttctttctgaagagtggtctctgcatgcccacctgtgtccctggtttctctggccactcatctaatgaaaactgtactgacaaaatgtacactccaagtcttcatgtgaacggctccttgacccttggaattggttcaatgaagccactggacttttctctcctgaacatccaacaccaggatggcagagtggaagatctgctgttccacgttgtaagcacacccaccaacggtcagctgctgctctcaagaaatggcaaggaggtccagctggagaaggctggccattttagctggaaagatgtgaatgagaagaaagtacgctttgtacacagcaaagagaagctcaggaaaggctacttttccttgaaaattagtgaccagcagttcttctctgagccacagctgatcaacatacaggccttttcaacgcaggctccgtatgtgctgagaaatgaagttctccacgtcagcaaaggagagcgggcaaccatcaccacccagctgcttgacatccgggatgatgacaacccgcaggatgtggtcgtgaatgtgcttgatcctcctcttcatggccaattgctccaaatgcctccagcccctgcagcctctatttatcagttccatctggatgagctctccaggggcctcctcctctatgctcacgatggctcagacagcacatctgatattatagtctttcaggccaatgatggacactccttccaaaatatactgtttcacgtgaagaacatacccaagaatgacagagctctgcgacttgtgaccaactctatggtgtgggttccggaagggggaatgctgaagatcaccaaccgaatcttgaaggcccaagctccaggtgtcagagccgacgacatcatctacaagattacacacagccgcccccagtttggggaggtggtcctcctgatgaatctgcctgcagacagtccagccggtcctgcggaggaagggcatcacctgcctgatggaaggatggcaacccccatcagtacctttacccagcaggacatcgatgatggcgttgtgtggtacagacacttgggagcccccacgcagagtgactccttccgctttcaggtgtctagtgccaccagtgcccaggaacacctggaaagtcacatgttcaacattgcaatcttacctcaggcgcctgaggcacataaactctccttggggacatctctccatatgaccgctcgtgaagatggcctaagtgttattcagccccagtccttatccttcgtgaaggcagagagtcccagtggaaagattatatacaacatcaccgtacctctgcatccaaatcaaggtatcattgaacacagagaccggcctcactctcccatccagtatttcactcaggaagatataaaccaaggacagatcatgtatcgccctcctgtggcacctccccacctccaggagatcatggccttctcatttgctggtctcccagaatcagtgaaattttacttcacagtttctgatgggcagcacacgagtccagagatggccctcaccattcacttgctgcactctgatctgcaaccaccagcatttcaggtcaaggctcccctgctggaagttagccctggaggccggacctctttaggcctgcagttgttagtgagagatgctcaggtggtgccagaagagctcttcttccagcttcagaagtctcctcagcatggcatgctcgtgaagtacacggcaaagtcctcggtgaccatggctgcaggtgacacttttacatatgatgaagtcgagagaaacgttctgcagtacgtacatgatgggtcctctgcgtgggaggacagcctggagatctcagtcacagatggcctgacagtgacaacatcagaagtaaaagtggaggtgtccccatcagagaaccgagggcccaggctggcccccggctcctccctgagcatgacggttgctagtcaacacacggccataatcaccaggtcacaccttgcctatgtggatgattcttcctctgacccagagatctggattcggttaagttctctgccactgtatggcgtactcttcagaagctcagggcctgacatggacgagctctcgggggattccaacttcaccatggaggacatcaacaagaagaacattaggtactcagctgtgtttgagacggacgggcattcggttacagatggcttccacttctctgtctcagacatggacggcaaccatgtggacaaccaggtctttaccatcacggtcactcctgccgagaaccctccacacatcattgcctttgctgaccttatcacggttgatgagggagggagagcaccactctctctccaccacttctttgcgactgaagatcaggacaaccttcaggacgacgctgtcattaaactaagcgctctgcccaagtatggctgcatcgagaacacaggaacaggagatcgctttggcccaggagccaacagtgaactggaggcgtcattccctattcaagatgtcctcgaaaactacatttattactttcagagcgttcatgaaagcatcgagccgacccacgatgtgtttagtttttatgtgagtgacggaagcggtcgctctgaaatccacagcatcaatatcaccattgagaggaagaacgatgagcctcccaggatgaccttgcggcccctgggcgtacggctgagctcgggagtggcgataagcaattcttccttgagtctacaagatctggacaccccagataacgagctgatctttgtattgatgaaaaagcctgaccatggtcatctactccggaggtctactgcctctgaccctctagaacatgggacagtcttagaccaaggctcctccttcacctatcaggatgtcctagctgggctggttggctacttacctggtgatatctatatggcagtcgatgagttccggttctctctcacggatggcctccatgtagacacaggaagaatggagatctatatagaactgccatcaaccaacattccccacttggcaataaaccgaggacttcagctttcagcagggtccgtagcacgcatcacagagcagcacttgaaagcaacagacactgactctgaggccggccaggttgtatacatcatgaaggaagaccctggtgcagggcgtctgctgatggctaaggctgacaacctagagcaaatctctgttagaggccccatccggagcttcacccaggcagacgttagccaaggtcagatagaatacagccatggaccaggagaacctggtgggagctttgcttttaaatttgatgtggttgatggggaaggcaataagttggctgaccagtcattttccatcggtgttttagaagacaaatccccaccagtcgtcatcaccaataaagggctggtcttagatgagaactcggtggagaaaatcactactgcacagctgtcggccaccgaccaggacagcaaacctacagaactcatctacaggatcaccactcagccccagctgggccacctggaacatgtggcctccccaggcatccagattagttccttcactcaagctgacctggcttcacgcaatgttcaatatgtccgttctagtgggaccgggaaacaatcagacgccttcagcttcgtgctgtctgatggcttgcatgaggtgacacagaccttccccatcactattcacccgttggatgatgcacagccccttgtgcagaaccggggcatgcgtgtgcaagagggtgtgaggaagaccatcaccgagtttgagctgaaggcagtagatgtggacacagaggctgagtccatcaccttcaccattgtgcagcctccacgtcatggcaccatcgagagaactgccagggggcagcgttttcaccaaacctcctccttcactatggaagacatctaccagaaccgtgtcagctatagccatgacggcagcaactccctcaaagaccgatttaccttcaccgtttctgatgggaccaaccccttctttatcattgaggagggaggagaagagatcatgacagcagcccctcagcagttccatgtggacattctcccggtggatgacggcacccctagaattgtcaccaatttggggctccaatggctggagtatatggatggcaaggcaaccaacctgatcaccaagaaggaactgctgaccgtggatccagacacagaggactcacagcttatctatgaggtcaccacaggccccatgcatggctacctggagaacaagctgcagccgggcagagcggcagccaccttcacccaggagcatgtgaacttggggttgattcgttatgtgttgtatgaggagaagatccagaaagtgatggatagctttcagttcctggtgaaggacagtaaacccaatgtggtcagcgacaatgtcttccatatccagtggtctctcatcagctttaaatataccagctataatgtcagcgagaaggcggggtctgtcagtgtcacggtgcagaggactgggaacctgaaccagtacgccatcgtcctgtgtcgcactgaacaaggcacagcgagctccagctctcatcctggacagcaggactacatggagtacgctggccaggttcagtttgatgaaggagaaagcacaaagtcctgcactgtcatcatcaacgatgacgacgtatttgagaatatcgaaagtttcaccgtggggctcagcatgccagcctatgccctgctgggagagttcacccaggcgaaggtcattatcaatgacactgaggatgaacctacgttggagtttgataagaagacctaccgggtcaacgagagcgctgggtttctctttgcacccatcaaaagacaaggagactcaagcagcactgtgtctgccgtttgctacacagtccctaagtcagccatgggaagtagcctctatgccctggaatccggatccgactttaagtccagagggaggtctgctgagagtcgtgtgatattcggacccggtgtcaccgtgtccacctgtgatgtcatggtcattgatgacagtgaatatgaggaggaagaggagtttgagatagccctggctgatgcttctaacaatgccagaattggaaggcaggcggtggccaaggtcctcattagtggtcccaatgatgcctcaactgtctccctgggcaacacagctttcaccatcagtgaggatgcaggcacagtgaagattccagttatccgtcatggcactgacctttctaccttcacatctgtctggtgtgccacacggccctcggacccagcttctgccactccaggagttgactatgtccccagctcaaggaaggtggaatttgggcccggtatcactgaacaatactgcactttgactatcttggatgacacacagtacccagtaattgaaggactggagacgtttgtggttttcctcagctcagcacaaggagccgaactgaccaagccctctcaggctgtcattgcaattaatgacacattccaggatgttcccagcatgcagttttccaaggatttgcttctagtgaaggaaaaggagggtgtcctgcacatccccatcatccggagcggggacctgagttacgagtcatcagtgcggtgttacacgcagggccactctgctcaggtcatggaggactttgaagagagaagaaatgcagactcctccaggattacgtttctgaaagggcagaagacgaagaactgcactgtctacatccatgacgactccatgtttgagcctgaggagcagttcagggtctaccttggccatcctcttggaaatcactggagtggagccagaattgggaagaacagtgtggccactgtcaccatatccaacgacgaagatgcccccaccattgagtttgaagaagccgcataccaagtccgggaacctgcagggccagaagccattgcagttctgagcatcaaggtcatccgcagaggtgatcaaaataggacctccaagatccgctgcagcactcgagacggctctgcccagtctggtgtggattattaccccaagagcagagtcctgaaattcagccctggcgttgatcatatcttcttcaaagtcgagatcctgtccaatgaggaccgagaatggcatgagtccttttctctagtccttggcccggatgatccagtggaagccgtacttggagacgtgacgactgctacagtgaccattctagaccaggaggcagcagggagtctcatactgccagcgccacccattgtagtcactcttgctgactatgaccacgtggaagagctggcaaaggaaggtgtcaagaaagccccgtcgccaggctacccactagtctgtgtcacaccctgtgacccacgctaccccaggtatgctgtcatgaaggaacggtgcagcgaggctggtatcaaccaaacatctgtgcagttcagctgggaagtggctgcgcccaccgatggcaatggggctcggtctccctttgagaccatcacggataacacaccattcaccagcgtcaaccacaaggtcctagacagcatttatttcagccggaggttccatgtgcgttgtgtggccaaggctgtggacaaggtgggccatgtagggacccccttgaggagcaatgttgttaccattggaacagacagtgctatctgccacaccccagtcgtggctgggacagctcgaggcttccaggcacagtccttcattgcgaccttgaagtacctggacgtcaaacacaaagaacatccaaacagaatccacatctctgtgcagatccctcaccaggatggaatgctgccccttatctcaaccatgcccctgcacaacctgcacttcctgttgtcggagtccatctacagacaccagcatgtctgctccaacctcgtcacggcgcgggacctgcgaggccttgcagaggcagggttcctggatgacgccggtttccacagtactgccctgggccctggctatgaccgccccttccagtttgactcaagtgtacgggagcccaaaaccatccagctctacagacacctgaacctaaagagctgcgtgtggacctttgatgcgtactacgatatgacagagcttatcgatgtgtgtgggggctccgtgactgctgacttccaggtgagagattctgcccagtcgttcctgacggttcatgtgccactctacgtgtcctacatctatgtgacagcacccaggggctgggcctccttagagcaccacactgagatggaattctctttcttctatgacacagttctctggagaacagggatccagacagacagcgtgctctctgcaaggcttcagataataaggatctacattagagaggatggccgtctcgtcattgagttcaagacccatgccaaattcagagggcagtttgtgatagagcaccacaccctcccggatgtgaagtctttcatattgactccagaccacctaggaggaattcagtttgacctgcagctcttgtggagtgctcagacatttgattctcctcatcaactctggcgagccacgagctcttacaatcgaaaggactactccggggagtacaccatctacctgatcccgtgcaccgtgcagcccacacagccctgggtggacccaggagagaaggccttggcctgcacggcacatgccccagaaaggttcctgatacccatcgcgttccagcagaccaaccgccctgtgccggttgtgtattcgctcaatactgagtttcagctctgcaataacgagaaggtattcttgatggatcccaacacgtctgatatgtcactggcagagatggattacaaaggagccttttccaaaggtcagatcctttacggccgagtcctttggaatccagaacaaaaccttcattctgcttacaaactgcagctggagaaagtctatctttgtaccggcaaggatggctacgtgccgttctttgaccctacggggacgatctacaacgaagggccacagtacggatgcattcagccaaataaacacctgaagcacagattcctgctgctggaccgcagccagccagaggtcactgacaagtacttccatgatgtgcctttcgaggctcactttgcttccgagttgcctgatttccaggtggtcagcagcatgccgggtgtggatggattcaccctcaaagtagatgccctctataaggtggaagcaggacaccagtggtatctccaggtgatctacatcattggccctgacagcacctcaaggcctcgggtccagcgctctctcacggtctctctgaggcgtcaccaaagggacctggtggaccccagtggctggctgtctcttgatgactccctcatctatgacaatgaaggagaccaagtcaagaatggcaccaacatgaagtccctgaacctggagatgcaggagcccgttatagctgcttccctgtcgcaaaccggagcctctatcggcagcgcgttggcagctatcatgcttctcctattgctgtttctggtggcctgttttgtcaccaggaaatgccagaagcaaaagaagaaacagcctccggaggacactctggaggaataccctctgaataccaaggtggatgtagccaagagaaatgcagacaaggtggagaagaatgccaacagacagtactgtaccgtgcgcaatgtcaacatactgagtgacaatgaagggtattatacgttcaaaggtgctaaagtcaaaaaactgaatctggaggtcagagtccacaacaatttacaagatgggacggaagtttaatgagaaaccctgagatgtattttcttttttttctaaaatcctttttataaaacggggagaaatactggtatttttataatctttcaaattaaacaaaaaaaagggaaaactagctttgagtggcggacagcacacatcgcatgcatcaactcacaactgagctacctcatgaaacagaaccactgagacaccccccttgccctagagtgtcagagtaaggttatgcctacaggtccctgtaacagtctcagtggccacacagagcgactctgtaaggctggccccagaagtgttttaggattaggacagacactggacaattagcttcactgattggatcgagaaagctgggctctgtgggcagcagatatctgcaagtacaaacaaagcctttggtttcttcctctgccccagctctcttctgtgtgggcctttctggacttctggacacagaatacagaatgctgacacacagattccattgacaattctaatcagcacaacttagacatctgtgcactgtccccacttactatcctgtgcggccaggcctctaagtatacttggcttttctagagccctttttgaatggggatctcaatatgctttagactgaggaggactccagccagggccatgaagagcactgcgaagtaccacagcctctgcatgccagagatacttttaaaactcagccccgcttccccaggcgttctgtggttcatcagtgcatagggagctcatgtgtttggggttttttgtttttttttttaattttgttagtgatttttagaaagtaagcgaatcatttgagtgagtgaatttcctagaggttggaatgaaaccagagttaacagatacacatgggacctgtttgctgtgtgtcatacagcagatagagccactgtccctggtgccatagtccggggaattctctctgggggttcttttctggtagctcaggctcttagtttctcccacatcagcacatgacaacccacatatatgtatgtggcttttacatagcatagtgttcaaatatcgacttgaatattctgtgtgtagtatgcacacaacttgcctttgttttcttttctgtttctaccttatgggtacaatctgaaccgtgcacattgtgtttttaatcagagtcacaattccattagccagaagcaaatgctgttcttgtgcatggcacatccgatcagtgagtaaatcacagagcgtccgcgttgtgtcgtatccgtatggaaatgacacaaactctttgagaacattccagactcctactaaaatctagaaggaatgaaccatgaaagttttacaggcaactctgcagacccccgagctcaagagcagagcctgtgtgagccacggctggctcttcatccttcagcagtgccttgcacactacaagcgtgcagaaatgtttgttgagtgaatgaatggacggcgtgccgagtgaatgataggcagtaaacagaggaagaggaggtgagacgttatgctggcagtattacagggtgtgtagggatgatctctgttgtatttggtttgtgaaatagtccttcaactgagaggggaaaaaaaagcacacttttaggtgggtgtggccggtggtgtatctggggagtcgggaacagaaatactgcggtaatgcatgagccgcatgttggcttccagagcaggagatctggaggaaagccgatttcacatttcgaaggtaataatagtgtgttcgttcagggcaggaaaggttggctgagcccagaaattcctggctggtcaggtgctccttcagaccagcttgcataattcataatttcataattcagggcagaaattctgaaattgcttcaagaatctggaatcgctacccatctcttgcagcaaaactgatgagccacaccctggatctccaggacaacagacagggctagagcgcagacagggagccaatcatctgtagagcagcttcccattggcccattactggtcacacctcccgctgtccagatgtttgcacattagagctttcagtgggctccacacccacacacataccttcctttacacctagtgggacacatacatgtgaagagatggcagagcctggcgcgggaagagaggctgaatctgaaggcctttgtgtacaggtgggcagtgaaagacaggagcctgtgtggacctggtcgttgtgaactctggatgagagaacagcccctgaaatagccctgcctcccagcctcgcccctaagacgctttattagaagccagccttctctggtggatgcctacttctgacgcaggaagcgttaagaggtatagagccgaggtttgccttttgaggagtgttgagtcattcatttcatttacgttttgtacttcatctttgggactggataatttggtgactaatgtggattctatttcagtgaaagctttgctttcagcgtttcttacttcttcactaatgccttgtgtgtgtttttactaaccttttagattgtaccttcaggtgagaagaacagaaaaaaataaaaataaaaaccctcagcagggttgctcttgctgccaggtgctggctgtggaggtcaaaagaagtaattgtctgcaccatttttctgccttgtcagcccctttactgtaccaaggtctttgggaaacccctgcaggttcctattgcagggtgggaaattgtgaagaaaagtgtttgcacaatcttaacaataagtgttcctggtctcttgtaggtttttgttattcctagttctcccctgctcagactgagaaaaacatttgtggtgctgtcaacctgtgttcttgaccctcaaatgattttgattttttttttttgtatttccaatatgaatttgtgtgttacgaatttctgatttcttcaatagcatatgctactatataaatttgtatcaataataaatgatggcccagttgtcaaaaaaaaaaaaaaaaa

SEQ ID NO: 161 - DNA, 1321 bp, Mus musculus
ggtccctttgagatgtctcaccagtgacatcacagtgattgtcacttccctcagactacattaggccctgcccagagtccaggagctcagacagccggggagacagctggaggtggagagactgaggtccttggtagcctgagtgtgcccctgctcctcttcaggaagtgaagacaagccttggtgtgcaatcacaagtccttctggagttctcatccagacattctgaagatggagaggtctactcaggagctgtttatcaacttcacagttgtcctcatcaccgttctccttatgtggctcctcgtgaggtcctaccaatactgaggggccatgctatactccagggagtgactgctgtgtgccccgagcttccaatgctctattgtcatgagatgctgcttctggctcctccagcatctctgacccacactcacaatgcctgacacaccgctgcactaggtccttggcatgttttctaaagatgctgttcttgtaggctgcccaaagcttgccagccagtgagccttagctttgttccctagcaaatgtactattcaagtcaccaggttaaaattaaactggattcttatgatgcagagtaacaacaagttgctggtctgtgtctacatacctcccccaactcactgtctgccatcaaactaatccagccccaaggaagaatgtaggaggaagtctctgccagtcccttgagttccttgtgagtaaaattaagccactcataaaaacagtgtttagaatttattttagcttcaatttgacccttggctgggaccaaagtgacaaatagcacattatttctagcatttgagattagccaagatgctccagctgcctagaatctgaaagaaagccaagtcagagtgtcatatcttagataattccattgcttctcaaacctttccttcgagaatcctatgaccagaggaagaataattccatcctgcagaagggttgggtcagagcccagaatgctcactaaaattacagaagtcctctgaagtcttgtgctttatccatagctttcacaagaaatgggctcaggaggtcaatagattgagttggtaaagcccttaccttgtaagttcaaagacctgagtctgaatcctcaaaacccatgtgaaaacccagcacagtggtgtgagcctgtaccttcagtgatggtgagatgggaagtagtagaaacagggaagacagattctggaaactttctggttggtcagtctagcctgcttggcaaagtttcatgccatgagggactccctctctaataaaaggtgggaggcaccagtggaatggc

SEQ ID NO: 162 - DNA, 5831 bp, Mus musculus
ctcgctccctctgtttctgtactctgggtgactcagagagggaagattcagccagcacactgctcgcgagcaagtgtcactctgctaactggcagagccaggagacctagatgtccacacccacagacccagcagcaatgccccatcctgggccctccccggggcctggaccctctcctggaccaattctggggcctagtccaggaccaggaccatccccaggttctgtgcacagcatgatgggtcctagtcccggacctcccagcgtctcacatcctctgtcaacgatgggctctgcagacttcccacaggaaggcatgcaccaattacataagcccatggatgggatacatgacaaagggattgtagaagatgtccactgtggatccatgaagggcaccagcatgcgccccccacacccaggaatgggccctccacagagccccatggaccagcacagccaaggttatatgtcaccacatccgtctcctctgggagccccggagcacgtctctagccctatatctggaggaggcccaaccccaccccagatgccaccgagccagccaggggcactcatcccaggagatccgcaggccatgaaccagcctaacagaggtccctcgcctttcagtcctgtgcagctgcatcagcttcgagctcagattttagcttacaaaatgttggccaggggccagcctctccctgaaactctgcagctggcagtccagggaaaaaggaccttgcctggcatgcagcagcagcagcagcaacaacaacaacagcagcagcagcagcagcagcagcagcagcaacagcagcaacaacagcagccccagcagcctcagcagcaggctcaggcacagccccagcagcagcagcaacagcagcagcagccagctcttgttagctataatcgaccatctggccccgggcaggagctgctactgagtggccagagcgctccgcagaagctgtcagcaccagcaccaagcggccgaccttcaccggcaccccaggccgccgtccagcccacggccacagcggtgcccgggccctccgtgcagcagcccgccccagggcagccgtctccggtcctacagctgcaacagaagcagagccgcatcagccccatccagaaaccgcaaggcctggacccggtggagatcctgcaggaacgagagtacagacttcaagctcgcatcgctcataggatacaagaactggaaagtctgcctggttccttgccaccagatttacgcaccaaagcaaccgtggaactgaaagcacttcgcttactcaacttccaacgtcagctgagacaggaggtggtggcctgcatgcggagggacaccaccctggagacggccctcaactccaaagcatataagcggagcaagcgccagaccctgcgtgaggcacgcatgacagagaaactggagaagcagcagaagatagaacaggagaggaaacgccggcagaaacaccaggaatacctgaacagtattttgcaacatgcaaaagattttaaggaatatcaccggtctgtggccgggaagatccagaagctctccaaagcagtggcgacttggcatgctaacacagaaagggagcagaagaaggagacggagcggatcgagaaggagagaatgcggaggctgatggccgaagatgaagagggctacaggaagcttattgaccaaaagaaagacagacgtctcgcctacctattgcagcagaccgatgagtatgtcgccaatctgaccaacctggtgtgggagcacaagcaggcccaagcagccaaagagaagaagaagaggaggaggaggaagaagaaggctgaagagaatgcagagggaggggaacctgccctgggaccagatggagagccaatagatgaaagcagccagatgagtgacctgcctgtcaaagtgacacacacagaaactggcaaggtcctctttggaccagaagcacccaaagcaagtcagctggatgcctggctggagatgaatcctggttacgaagttgcacccagatctgacagtgaagagagtgaatcggactacgaggaggaggatgaagaagaagagtccagtaggcaggaaaccgaggagaagatactgctggatcccaacagtgaagaagtttccgaaaaggatgccaagcagatcattgagactgcgaagcaggacgtggacgacgaatacagcatgcagtacagtgccagaggctctcagtcctactacacggtggctcacgctatctctgagagggtggagaagcagtctgccctcctcattaacggcaccctaaagcattaccagctccagggcctggaatggatggtttccctgtataataacaatctgaacggaatcttagctgatgaaatggggctaggcaagaccatccagaccattgcactcatcacgtatctgatggagcacaaaaggctcaatggtccctacctcatcatcgtccccctctcgactctgtctaactggacatatgaatttgacaaatgggctccttctgtggtgaaaatttcttacaagggtacccctgccatgcgacgctccctcgttccccagctacggagtggcaaattcaatgtcctcctgactacttacgagtacattataaaagacaagcacattcttgcaaagattcggtggaagtacatgatcgtggacgaaggccaccggatgaagaatcaccactgcaagctaacccaggtcctgaacacacactatgtggcccccaggcggatccttctgactgggaccccactgcagaataagcttccggaactctgggccctcctcaacttcctcctccctacaatcttcaagagttgcagcacatttgagcagtggtttaatgctccatttgccatgaccggtgaaagggtggacctgaacgaagaagaaacgattttgatcatcaggcgtctacacaaggtgctgagaccctttttactgaggaggctgaagaaagaggttgagtctcagcttccggaaaaggttgagtatgtgatcaagtgtgacatgtcagctctgcagaagattctgtaccgtcacatgcaagccaaggggatcctcctcacggacgggtctgagaaagataagaaggggaaaggaggtgccaagacacttatgaacaccatcatgcagctgagaaaaatatgcaaccacccatatatgtttcagcacattgaggaatcctttgctgaacacctgggctattcgaatggggtcatcaatggggctgagctgtatcgggcctcgggaaagtttgagctgcttgatcgtattctgcccaaattgagagcgactaaccaccgcgtgctgcttttctgccagatgacgtcactcatgaccattatggaggattactttgcttttcggaacttcctgtacctgcgccttgacggcaccaccaagtctgaagatcgtgctgctttgctaaagaaattcaatgaacctgggtcccagtatttcattttcttgctgagcacaagagcagggggcctgggcttaaatcttcaggcggcagacacggtggtcatatttgacagcgactggaatcctcaccaggatctgcaggcccaagaccgagctcaccgcattggccaacaaaacgaggtccgggtgctgaggctttgcaccgtcaacagtgtggaggaaaagattctcgcggctgccaagtacaagctgaacgtggatcagaaggttatccaagcaggcatgtttgaccagaagtcatccagccacgagcggagggccttcctgcaggccattctggagcacgaggaggagaatgaggaagaagatgaggtaccagacgacgagaccctgaaccagatgattgctcgccgggaggaagaatttgatctttttatgcgcatggacatggaccggcggagggaggatgcccggaacccgaagcgcaaaccccgcttgatggaggaagatgagctgccctcctggattatcaaggatgacgccgaagtggaaaggctcacctgtgaagaagaggaggagaagatatttgggaggggctctcgccagcgccgggatgtggactacagtgatgccctcaccgagaagcaatggctcagggccatcgaagacggcaatttggaagaaatggaagaggaggtacggcttaagaagagaaaaagacgaagaaatgtggataaagaccccgtgaaggaagatgtggaaaaagcgaagaaaagaagaggccgccctccggctgagaagttgtcaccaaatcccccaaaactaacgaagcagatgaacgccatcattgatactgtgataaactacaaagacagttcagggcgacagctcagtgaagtcttcattcagttaccttccaggaaagacttaccagaatactatgaattaattaggaagccagtggatttcaaaaagataaaggagcgaatccgtaatcataagtatcggagcctgggagacctggagaaagacgtcatgcttctctgtcacaacgcacagacattcaacttggaaggatcccagatctacgaagactccattgtcctacagtcagtgtttaagagtgctcggcagaaaattgccaaagaagaagagagtgaggaagaaagcaatgaagaagaggaagaagatgatgaagaggagtcggagtcagaggcgaaatctgtgaaggtgaaaatcaagctgaataaaaaggaagagaaaggccgggacacagggaagggcaagaagcggccaaaccgaggcaaagccaaacccgtcgtgagcgattttgacagtgacgaggaacaggaagagaacgaacagtcagaagcaagtggaactgataacgagtgaccatcctggacgtgagcttcccgcggtggcagaaccgaatgctttcttccccctctccttcctccccagtgagttcacttgccattcgggcacactgggttatttctccgtcctcattgtcatctagaactagctttagggtagtgccagacaaacatatgatatcatggtgtaaaaaaagaaacacatgcgtgcagacacactacacacacacacacacacacacacacacacacacacacatatttgtaacatattgtgaccaaatgggcctcaaagattcaaagattaaaaacaaaaagcttttgatggaaaagatgtgggtggatagtatatttctacaggtgggtcaggtttggtagcagtttgatgtgctgggttctgtcatctgttctgatgagaagatttttatcttctgcagtgctgatggccgggaggaaccattcaaagccactggttattttgtttttcatcaggcgattttcaagattttcatttgtttcagtattgttggttttctcttttctcttttttacactgtggtacatataagcaacttgactagtgacaaatgtacagtagttagatatcacctacatatacatttttccattttatgctctatgatctgaagaacaaaaaaaaaagctttttgacttgtataagatttatgtctactgtaaacattgcggaatttttttttgttcttgttttattgacaatgctattgagtattacagtgtctagaataccctggatggcttctcttgtccacccgatctcccgtgttaccaatgtgtatggtctccttctcccgaaagtgtacttaatctttgctttctttgcacaatgtctttggttgcaagtcataagcctgaggcaaataaaattccagtaatttccaagaatgtggtgttggtactttcctaataaaccgataacgtaccttgaaaaaaaaaaaaaaaaaaa

SEQ ID NO: 163 - DNA, 7849 bp, Mus musculus
ctcgctccctctgtttctgtactctgggtgactcagagagggaagattcagccagcacactgctcgcgagcaagtgtcactctgctaactggcagagccaggagacctagatgtccacacccacagacccagcagcaatgccccatcctgggccctccccggggcctggaccctctcctggaccaattctggggcctagtccaggaccaggaccatccccaggttctgtgcacagcatgatgggtcctagtcccggactgtaaagaatacagatcaggtgtaaatgtgaatttctgtccattttttcgttggagggcggggtggggggaggggcagaaacgaagattagtggactaaaagctctactcctgcagggtcacctttgtccctcgattactcttggacattggtacaggtaacagccaatagaagactcctagtccttaaaaccacttgccataaccaatggctgtaattttaggaaaggagtggtcttaagatgtgagggcttaaaacaccctacggaatccataggatctgtaagttgagttgaagagatgtatctttggtgagaaattggagccagttttataatttgaccgtgtttgggcaaattggggttttactccatcttttctggtcagtttctatgtgtgactcaaaactgtcactttgctctccttggtaaggagaggaaggtctcaggaagccaggaagcccactctaattcttacaaaccccagagcttgagccacactgattacccccctgtgttctttgccaagagcatgccacaaaatatgtgacccgaaggcatcgaagaagccaagaatggaaaaattccctaaaggaaagtgacatttaattgggaaatttcagagatctgtcactcctagtgacaacccagaaaaaactgctttgcagctttgtgactggaggtgagctgcaactgtcagctgaagttagcacgggactccctgcagggaggcctttaggggcggagagcaagggacagctgcctttgcacatggctcccccaatctcgaatagaatatcgtgtgtgtgtgtgtgtgtgtgtgtgtgtgtgtgtgtgtgtgtgtgtgtgtgtgtgtttaaagctgtaccaaaactgtagtttaaaatgctgtcaattttccaattaagatatccagcttgataagccgagctatggacccatgggagggggagaaaaacatggttcttgggagtttgtacaaaaaatatggtgctgggtgggtgctaagaacaaacggtcttataacccatggtctttctacacagatccgtttggggaaagactgcccccagagtagcctgcttttcataagcttcccaatcaagatttcggggcaaagcactcccctcctccctcgcacagcctgcttcttctctctgccctctctcgtccctcccattctctatttccctccccggcagggtgtagttgagtgaaggcaggatcaggttccccgcctacccgtccaaatatcccgccaaggaagccccagagcacaagaaaacccaaagtggagagaggggaagaaagaaagcactgagtcatccatccagaaggggggagagcagagcgcagccgcccaggcaggagcatcagccagcgatacctggagtctgcagaaacctcgcccgcactttgcaacaaaggcagccagctagtcagcgaggacctctgcaagccaaaaaatgtcgtcccagcaatatcagcagcaacgtagaaaatttgcagctgccttcctggcattgattttcatcttggcagctgtggacactgctgaggccgggaagaaagagaaacctgaaaaaaaggtgaaaaagtctgactgtggagaatggcagtggagtgtgtgtgtgcctaccagcggggactgtggattgggcacccgggagggcactcgcactggcgccgagtgcaaacagaccatgaagactcagagatgtaagatcccttgcaactggaagaagcagtttggagctgagtgcaagtaccagttccaggcttggggagaatgtgacctcaataccgccttgaagaccagaactggcagcctgaagcgagctctgcacaatgctgactgtcagaaaactgtcaccatctccaagccctgtggcaagctcaccaagcccaagcctcaagcggagtcaaagaagaagaaaaaggaaggcaagaaacaggagaagatgctggattaaaagacgccaccgtctgtggaccaggaaaagggcatcagcaaacagacctcccagcgtctcacatcctctgtcaacgatgggctctgcagacttcccacaggaaggcatgcaccaattacataagcccatggatgggatacatgacaaagggattgtagaagatgtccactgtggatccatgaagggcaccagcatgcgccccccacacccaggaatgggccctccacagagccccatggaccagcacagccaaggttatatgtcaccacatccgtctcctctgggagccccggagcacgtctctagccctatatctggaggaggcccaaccccaccccagatgccaccgagccagccaggggcactcatcccaggagatccgcaggccatgaaccagcctaacagaggtccctcgcctttcagtcctgtgcagctgcatcagcttcgagctcagattttagcttacaaaatgttggccaggggccagcctctccctgaaactctgcagctggcagtccagggaaaaaggaccttgcctggcatgcagcagcagcagcagcaacaacaacaacagcagcagcagcagcagcagcagcagcagcaacagcagcaacaacagcagccccagcagcctcagcagcaggctcaggcacagccccagcagcagcagcaacagcagcagcagccagctcttgttagctataatcgaccatctggccccgggcaggagctgctactgagtggccagagcgctccgcagaagctgtcagcaccagcaccaagcggccgaccttcaccggcaccccaggccgccgtccagcccacggccacagcggtgcccgggccctccgtgcagcagcccgccccagggcagccgtctccggtcctacagctgcaacagaagcagagccgcatcagccccatccagaaaccgcaaggcctggacccggtggagatcctgcaggaacgagagtacagacttcaagctcgcatcgctcataggatacaagaactggaaagtctgcctggttccttgccaccagatttacgcaccaaagcaaccgtggaactgaaagcacttcgcttactcaacttccaacgtcagctgagacaggaggtggtggcctgcatgcggagggacaccaccctggagacggccctcaactccaaagcatataagcggagcaagcgccagaccctgcgtgaggcacgcatgacagagaaactggagaagcagcagaagatagaacaggagaggaaacgccggcagaaacaccaggaatacctgaacagtattttgcaacatgcaaaagattttaaggaatatcaccggtctgtggccgggaagatccagaagctctccaaagcagtggcgacttggcatgctaacacagaaagggagcagaagaaggagacggagcggatcgagaaggagagaatgcggaggctgatggccgaagatgaagagggctacaggaagcttattgaccaaaagaaagacagacgtctcgcctacctattgcagcagaccgatgagtatgtcgccaatctgaccaacctggtgtgggagcacaagcaggcccaagcagccaaagagaagaagaagaggaggaggaggaagaagaaggctgaagagaatgcagagggaggggaacctgccctgggaccagatggagagccaatagatgaaagcagccagatgagtgacctgcctgtcaaagtgacacacacagaaactggcaaggtcctctttggaccagaagcacccaaagcaagtcagctggatgcctggctggagatgaatcctggttacgaagttgcacccagatctgacagtgaagagagtgaatcggactacgaggaggaggatgaagaagaagagtccagtaggcaggaaaccgaggagaagatactgctggatcccaacagtgaagaagtttccgaaaaggatgccaagcagatcattgagactgcgaagcaggacgtggacgacgaatacagcatgcagtacagtgccagaggctctcagtcctactacacggtggctcacgctatctctgagagggtggagaagcagtctgccctcctcattaacggcaccctaaagcattaccagctccagggcctggaatggatggtttccctgtataataacaatctgaacggaatcttagctgatgaaatggggctaggcaagaccatccagaccattgcactcatcacgtatctgatggagcacaaaaggctcaatggtccctacctcatcatcgtccccctctcgactctgtctaactggacatatgaatttgacaaatgggctccttctgtggtgaaaatttcttacaagggtacccctgccatgcgacgctccctcgttccccagctacggagtggcaaattcaatgtcctcctgactacttacgagtacattataaaagacaagcacattcttgcaaagattcggtggaagtacatgatcgtggacgaaggccaccggatgaagaatcaccactgcaagctaacccaggtcctgaacacacactatgtggcccccaggcggatccttctgactgggaccccactgcagaataagcttccggaactctgggccctcctcaacttcctcctccctacaatcttcaagagttgcagcacatttgagcagtggtttaatgctccatttgccatgaccggtgaaagggtggacctgaacgaagaagaaacgattttgatcatcaggcgtctacacaaggtgctgagaccctttttactgaggaggctgaagaaagaggttgagtctcagcttccggaaaaggttgagtatgtgatcaagtgtgacatgtcagctctgcagaagattctgtaccgtcacatgcaagccaaggggatcctcctcacggacgggtctgagaaagataagaaggggaaaggaggtgccaagacacttatgaacaccatcatgcagctgagaaaaatatgcaaccacccatatatgtttcagcacattgaggaatcctttgctgaacacctgggctattcgaatggggtcatcaatggggctgagctgtatcgggcctcgggaaagtttgagctgcttgatcgtattctgcccaaattgagagcgactaaccaccgcgtgctgcttttctgccagatgacgtcactcatgaccattatggaggattactttgcttttcggaacttcctgtacctgcgccttgacggcaccaccaagtctgaagatcgtgctgctttgctaaagaaattcaatgaacctgggtcccagtatttcattttcttgctgagcacaagagcagggggcctgggcttaaatcttcaggcggcagacacggtggtcatatttgacagcgactggaatcctcaccaggatctgcaggcccaagaccgagctcaccgcattggccaacaaaacgaggtccgggtgctgaggctttgcaccgtcaacagtgtggaggaaaagattctcgcggctgccaagtacaagctgaacgtggatcagaaggttatccaagcaggcatgtttgaccagaagtcatccagccacgagcggagggccttcctgcaggccattctggagcacgaggaggagaatgaggaagaagatgaggtaccagacgacgagaccctgaaccagatgattgctcgccgggaggaagaatttgatctttttatgcgcatggacatggaccggcggagggaggatgcccggaacccgaagcgcaaaccccgcttgatggaggaagatgagctgccctcctggattatcaaggatgacgccgaagtggaaaggctcacctgtgaagaagaggaggagaagatatttgggaggggctctcgccagcgccgggatgtggactacagtgatgccctcaccgagaagcaatggctcagggccatcgaagacggcaatttggaagaaatggaagaggaggtacggcttaagaagagaaaaagacgaagaaatgtggataaagaccccgtgaaggaagatgtggaaaaagcgaagaaaagaagaggccgccctccggctgagaagttgtcaccaaatcccccaaaactaacgaagcagatgaacgccatcattgatactgtgataaactacaaagacagttcagggcgacagctcagtgaagtcttcattcagttaccttccaggaaagacttaccagaatactatgaattaattaggaagccagtggatttcaaaaagataaaggagcgaatccgtaatcataagtatcggagcctgggagacctggagaaagacgtcatgcttctctgtcacaacgcacagacattcaacttggaaggatcccagatctacgaagactccattgtcctacagtcagtgtttaagagtgctcggcagaaaattgccaaagaagaagagagtgaggaagaaagcaatgaagaagaggaagaagatgatgaagaggagtcggagtcagaggcgaaatctgtgaaggtgaaaatcaagctgaataaaaaggaagagaaaggccgggacacagggaagggcaagaagcggccaaaccgaggcaaagccaaacccgtcgtgagcgattttgacagtgacgaggaacaggaagagaacgaacagtcagaagcaagtggaactgataacgagtgaccatcctggacgtgagcttcccgcggtggcagaaccgaatgctttcttccccctctccttcctccccagtgagttcacttgccattcgggcacactgggttatttctccgtcctcattgtcatctagaactagctttagggtagtgccagacaaacatatgatatcatggtgtaaaaaaagaaacacatgcgtgcagacacactacacacacacacacacacacacacacacacacacacacatatttgtaacatattgtgaccaaatgggcctcaaagattcaaagattaaaaacaaaaagcttttgatggaaaagatgtgggtggatagtatatttctacaggtgggtcaggtttggtagcagtttgatgtgctgggttctgtcatctgttctgatgagaagatttttatcttctgcagtgctgatggccgggaggaaccattcaaagccactggttattttgtttttcatcaggcgattttcaagattttcatttgtttcagtattgttggttttctcttttctcttttttacactgtggtacatataagcaacttgactagtgacaaatgtacagtagttagatatcacctacatatacatttttccattttatgctctatgatctgaagaacaaaaaaaaaagctttttgacttgtataagatttatgtctactgtaaacattgcggaatttttttttgttcttgttttattgacaatgctattgagtattacagtgtctagaataccctggatggcttctcttgtccacccgatctcccgtgttaccaatgtgtatggtctccttctcccgaaagtgtacttaatctttgctttctttgcacaatgtctttggttgcaagtcataagcctgaggcaaataaaattccagtaatttccaagaatgtggtgttggtactttcctaataaaccgataacgtaccttgaaaaaaaaaaaaaaaaaaa

SEQ ID NO: 164 - DNA, 9778 bp, Mus musculus
ttccctgaagctgcccggctaaggctgaggccggagccgatgcctccatgaggggctccctcccacaccccagggccagaggaccctctgccaccagagtgagaccctcgagaccatcatcctagtcaaccccactgcagacagcatcagctcagaggttcaccatcttcttagtagcccatcagctcacaaactcctcatcttgagtggacaaactttagaacccgagggagaccttatcctacagagtggtacttactcatatcaaaacttcgcccaggtccttcacaaacctgagattgcccagttgcttagcaatagagaccctgggatccaggccttcctcactgtttcctgcttaggggagggtgactggagccacctgggactgtctagttcccaagagaccttgcacctccggctaaatcctgagcctgtgctgcccaccatggatggagtggccgagttctccgagtatgtctctgagacggtggatgtgccgtccccctttgacctgcttgagccccccacctcaggaggcttcctcaagctctccaagccttgctgttacatcttccctggtggccgtggggactctgctctctttgctgtcaatggctttaacatcctggtggacggcggttctgaccgcaagtcctgcttctggaagctggtgcggcacctggaccgcattgactcggtgctgctcacgcacattggggctgacaatctgccaggcatcaatgggctcctgcagcgcaaggtggcagagctagaggaggagcagtcccagggctccagcagctacagcgactgggtgaagaacctcatctcccctgagctcggagtcgtgttcttcaatgtgcctgataagctccggctgcccgacgcctcccgcaaggccaagcgcagcatcgaggaggcctgtctcacccttcagcacctgaaccgcctcggcatccaagccgagcctctgtaccgagtggtcagcaacaccatcgagccgctgaccctcttccacaaaatgggtgtggggaggctggacatgtatgtcctcaaccctgtcaaggacagtaaggagatgcagttcctcatgcagaagtgggcaggcaatagtaaagccaagacaggcatagtgctggccaatgggaaggaggcagagatctccgtcccctacctgacctccatcactgccttggtggtatggctcccagccaaccctactgagaagattgtgcgtgtgcttttcccgggaaatgctccccagaacaagatcttggagggcctggaaaagctgcggcacctggacttcctgcgctatcctgtggcgacacagaaggacctggctgctggggccgtgcctgccaacttgaaacccagcaaaatcaaacatcgggccgacagcaaggagagcctcaaagctgcccccaagacagcaatgagcaagctagccaaacgggaggaggtgttagaagagggagccaaggaggcccgctcagagctggccaaggagttagccaagtcagaaaagaaagcaaaagagccgtccgagaagcccccagaaaaaccctccaagccagagagggtgaggacagagtccagcgaagcactgaaggctgagaagcggaagctgatcaaggataaagtgggcaagaagcacctgaaggaaaagatttcaaagctggaggagaagagggacaaggagaagaaggagatcaagaaggaaaggaaggaactcaagaaggaggagggaaggaaggaggagaaaaaggacgccaagaaggatgaaaagaggaaagataccaagccggaactcaagaaattctctaaaccagacctgaagccttttacccctgaggtccgtaagaccctctacaaagccaaggcccctggaaggctcaaggtggacaaaggccgagctgcccgtggggaaaaagagttgtcttctgagccccggacacccccagcccagaagggggctgcaccgcctcctgctgccagtgggcacagagagttggccttgtcctcaccagaggacctcacacaggactttgaggagttgaagcgtgaggagagaggtttgttggctgaaccaagggacacggaactgggtgagaaaccgctccctgcagatgcctccgagcagggacgcccaagcacagccatccaggtgacccaaccccctgcttcagtgttggagcaagaacaggtagaaagggagaaagaggttgtcccagactttcccgaggataaagggagcaagaacagagccccagactcaggtgctgaggtagagagagagaaagaaacctgggaggaaaggaagccgagagaagcagagctgaccccagagaacattgctgcggccagggaggagagtgaacctgaggtaaaggaggatgtgatagaaaaggctgagttagaggagatggaggaggtccatccctcagatgaggaagaggaagagacaaaggctgagagtttttatcaaaaacatatgcaggaagccttaaaggtaatcccaaaaggcagagaggctcttggcggccgggaactgggattccagggcaaggcgcctgaaaaggagacagcatccttcctgagcagcttggccacgcctgcaggagccgctgagcatgtctcctacattcaggatgagacgatccctggctactcagagactgagcagactatctcagacgaggagattcacgacgagccggacgaacgcccagccccaccccgattccccacgagtacctatgacctctctgggcctgaaggtcctggtccctttgaagccagccagtctgcagagagtgctgttccagccagctcgagcaaaacttatggggcacctgagactgaactcacctaccctcccaacatggtcgctgcccctctggctgaagaggaacatgtgtcctcagccacatcaatcacggagtgtgacaaactctcttcctttgccacatcggtggctgaggaccaatctgtggcttcactcacagctccccagacggaggagacaggcaagagctccctgttgctcgacactgtcacaagtattccctcttcccgcactgaagccactcagggcttggactatgtgccgtcagcaggcaccatctcacccacctcttccctggaagaagacaagggcttcaagtcaccgccctgtgaggatttctctgtgaccggggagtcggagaagaaaggagagtctgtggggagaggtttgatcggggagaaggctgtaggaaaggaagaaaagaatgtaacaacgtctgagaaactgtccagtcagtatgctgccgtgtttggtgcccctggacatgccctacatccgggggaaccggccctcggagaagtggaggaacggtgcctcagcccagatgatagcaccgtgaagatggcgtctcctccaccatctggcccacccagtgctgcccacacgccctttcatcagtcccccgtggaagaaaagtctgagcctcaagacttccaagaagattcctggggagacacaaagcacgctcctggtgtgagcaaggaagatgctgaagagcagacagttaagccagggcctgaggaggccatgtcagaagagggcaaagtacctctttccaggagcccccaagcccaggacacacttgggagccttgctgggggtcagactggctgtactattcaactgttgccagaacaagacaaagcagtagtgtttgagactggagaggcaggcgcagcttcaggagcaggcagccttcctggagaagtgaggactcaggagcccgctgagcctcagaaagatgagctgcttgggtttactgatcaaagcttttcccctgaagatgcagagtccctgtctgtcctcagtgtggtctccccagacactgccaaacaagaggccacccccaggtctccctgtaccccgaaagagcagcagctacacaaagacctttggccaatggtgtccccagaagacacccagtcactttctttctcggaagagagtcctagcaaggagacctctctggatatctcttctaagcagctctctccagaaagccttggcaccctccagtttggagaactaagcctaggaaaggaagaaaaggggcctctggtgaaggcagaagacaactcttgccacctagctcctgtgtctattccagagccccacacagccacagtgtcacctcccacagatgaggctgctggagaggcaggtctcacagatgagagccctgctggaaatttacctggcagctctttctctcactctgcactgtcaggtgacaggaaacactcacctggagagatcacgggccctggtggacactttatgacgtcggatagctccctcaccaagagtcccgagtctttgtcaagtcccgccatggaggacctggccatggagtgggggggtaaagctccggggtcggaagacagagccactgaacagaaggagaaggaactcgagcgaaagagtgaaaccctacagcagaaggaccagattctgtcggagaaggctgctgttgtccagcgggactcagtcatgcatcagaaggacgaggctctagatgaagagaacaagcctggaggacagcaggataagacttcagaacagaaaggcagagacttggacaaaaaagacacggctgtggagctgggcaaaggcccagaacccaaaggcaaagacttatatctggaggaccagggcctggcagagaaggacaaggcctcagaacaaaggggtgcaaccctgcaacagacccaggcccctgaaccaagagccagagcacaagagcacagagatttagaacaaaaggacgagcatttagagctgagagataagactcctgaagagaaagataaagtgttagtactggaagacagggctccagagcacatcatcccccaaccaacacagacagacagagctccagaacacagaagcaaggttgataaagaacagaaggatgaggcctcggaagagaaagaacaggttttagaacaaaaagactgggcccgagaaaaagagggtgctgccttggaccaagacaacagggctgccggacagaaagatgggaccctaaaagaagacaaaactcaggggcagaagagctctttcctggaagataaaagtacaacaccaaaagagatgacccttgaccaaaagtctccagaaaaggccaaaggtgtggagcagcagaatggagctgtcccggagaagaccagagctttggggctggaagagagcccagaagaggagggcaaggctcgagagcaggaagagaaatactggaaggagcaggatgtggtccagggatggcgagaaacatctccaaccagaggagagcctgttccagcctgggagggcaagtctcctgagcaggaagtcaggtattggagagacagagacataaccctacagcaggatgcatactggaaggagctaagctgtgagaggaaggtctggttcccccatgagctagatggacaaggagcccgtccacggtactctgaggaacgtgaaagtacgtttcttgatgaggggccaaatgaacaagaaataaccccactgcagcacactccccggagtccctgggcctcggatttcaaggatttccaggagcccctgccacagaaggggctggaagtagagcgctggcttgctgagtcgccagttggcttgccaccagaggaggaggacaaactgactcgctctccctttgagatcatctcccctccagcatccccacctgagatgactggacagagggttccctcagctccaggacaggaaagccctgttccagacactaagtccacaccacccacgaggaatgaacctaccaccccatcatggctagctgagatcccaccatgggtacctaaggacaggcccctgcctcctgcacccctctctccagctccagctcccccgaccgcggccccagacccacatgctcctgcgcccttctcctggggcatcgctgaatatgacagtgtggtggctgcggtgcaggagggggcagctgagttggaaggtggtccatactcccccctagggaaggactatcgcaaagctgaaggggaaagggaaggagagggtggggctggagctcctgacagcagctccttcagttcaaaggtcccagaggttacggagagtcacaccaccagggatgctgagcagactgagccagagcacagggagcccacaccctatcccgacgagaggagctttcagtatgcagacatctacgaacagatgatgcttactgggttgggctctgcttgccccaccagggagcctccactgggggcatctggggattggcccccacacctctcaaccaaggaggaggctgctggccgcaataagtctgcagagaaggagctttcatcccctgtgtcgcccccaaacctccaatctgacgctccagcgtttagctatgcatctctggcaggacccactatacctcccaggcaagaacctgagccagggcccaatgtggagcccagcttcacccctcctgcagtgccccctcgtgcccctatctccctgagccaagacccaagtccccctcttaatggaagcactacgagctgtggcccagacaggaggaccccatccccaaaggaagcaggccgaagtcactgggatgatggtactaatgactcagacctggagaagggggctcgggaacagccggagaaagagacccagtccccaagtccccatcaccccatgcctgtgggccacccttcactgtggcctgaaactgaggcgcatagcagcctttcctcagactctcacctaggacctgtccgaccaagtttggacttccctgcttcagcctttggcttctcctccttgcagcctgctccccctcagctgccctctccggctgaaccccgctccgcaccctgtggctctcttgccttctctggggaccgagctctggccctggttccaggaactccaaccagaacccgacatgatgagtacctggaagtgaccaaggcacccagcctggattcctcactgccccaactcccatcacccagctcgccaggggcccctcttctctccaatctaccccgacctgcctcgccagccttgtctgaagggtcctcttctgaggctaccacgcctgtgatttcaagtgtggctgaacgcttccctccaggtctagaggtggctgaacagagttcaggagaattgggcccagggaacgagccagctgcccacagcctctgggacctcactcctctgagcccagcccctttagcttcccgggacttggctccagctccagctcagcccactccaagcctgcctggaaacttgggtgacggtaccctgtcctgccgcccggagtgctcaggggaactcaccaagaagccaagcccctttctgagccactctggagatcatgaagctaatggcccaggagaaaccagccttaatcccccagggtttgccacagccacagcagaaaaagaagaggctgaagcccttcatgcttgggaacgagggtcctggcccgagggagcggagaggagctcccggccggatacacttctctcatctgagcagcgtcctgggaagagctccgggggtccaccctgcagtctttcttctgaagtcgaggctggacctcagggatgtgctacagacccccgcccccactgcggggagctttccccttcattcctgaaccctcctttgcccccatccacagatgacagtgacctttcaacggaagaggctcggctggcaggaaaaggagggcggcgccgggcagggaggccaggggccacaggaggtccatgccctatggctgatgagacaccccccacatcagccagcgactcaggctcctcacaatcagattctgatgtcccaccagaaactgaggagtgtccatccatcacagctgaggcagcccttgactcagatgaagatggggacttcttgcctgtggacaaagctgggggagttagtggaactcaccaccccagacctggccatgacccacccccagcccccctaccggacccccgcccaccccctccccgaccggatgtttgcatggctgaccccgaggggctcagctcagagtctgggagagttgagagactacgggaaaaggtgcagggacgacctggccgtaaggcccctggacgggccaagcctgcatctcctgctcggcgtctggatattcggggaaaacggtcacctactcctggcaaagggcctgtagatcgaacatcccgggccctaccccgaccacggagcaccccaagccaggtcacctcagaagaaaaggatggtcacagccccatgtctaaaggcttagtcaatggcctcaaggcaggatccacagccttggggtccaagggtagctctggccctcctgtgtatgtggatcttgcctatatcccaaatcactgcagcggcaagactgctgatcaggacttcttccgccgagtgcgtgcatcctactatgtggtcagtggaaatgaccctgccaatggcgagccaagccgggctgtgctggatgccctgctggaaggcaaggcccaatggggggagaaccttcaggtgactctgattcccactcatgatacggaggtgactcgtgagtggtatcagcagacacacgagcaacagcagcaactgaacgtcctggtcctggctagcagcagcactgtggtgatgcaggacgagtcctttccagcctgcaagattgagttctgaatgacctgcgctcccttccctaaggatccactcctacagttcatttagagaatggctactgctgagtcctctggggttgagggaaggcgagccgggcaggggccatgtcatgttattgggacttggggctaagtgggaggtcctgtccttcccctcatctcttcctggggtttcaagaccaaaggcaatgaggagatacatgattctgaaaggtcatctgaagcctgaaacccctaaagcaaccccctctcctagcattgccaaatgctggtcttggtgaggatgggtttcaaacagcacactcctcccggtggaggaagattaacaacagtctctcccccagaacctcattatttatttatttggcattccagaaaggattgctgataatttagatgatgcagggaaggccactgttagtaaggtgccagagctgcgccctttcctccatctgccatgccctagccactagagtctgggttccagcagcgacctggggacatgtggctgctctattgtcttactgcgtcccacaatatctgaatgtctcaatccaaaacttgaagctctttagaccaagaactagggagaggaaaaaggagctcatctctcagccccttcttcatagcatttacagccccgggctgtacccagaccaggctacctgggcagcacaaagggcaaggagagccccaaccccagttgctccaagctccccaatcacttagtcttcacctaccccattccaataagcctcatttcttctcatcccctgcttggcttctctgcatgtggtcatctgctatggcctggtgtgtaatgggttaaacaataagccactgcctgacacccacatccactttagccatgtgtgactccctaacattccaatcctctaccatcctgcagctgaaatgggaacactggctgcctctctaaacctaaactcttggatagagtttctgggaggtggaggctggactagagaactgggggagggga

SEQ ID NO: 165 - DNA, 2709 bp, Mus musculus
cctcctccgggcgggataattgaacgcggcgcgcaggagcctcgcgttggctgcccaggcctggctcgagcgtgtagccgctgcccgccgtgcctttgtccgccgccggagcccgccagccccatggagcgccccgtgccgtcgcgcctcgtcccgctgccgctgctgctgctcagcagcctctcgctgctggcagcccgagcgaatgcagacatctccatggaggcttgctgcacggatccaaatcagatggctaaccagcacagggactgctcgctgccgtacacctcagaatccaaggagtgcaggatggtccaggagcaatgttgtcacaaccaactggaagagctgcactgtgccacgggcatcaacctggccagcgagccagaaggctgcgcctcgctccacagctacaacagtagccttgagaccatcttcataaagaggtgctgccactgttgcatgctgggaaaggcatccctggcccgagaccagacctgtgaacccattgtcatgataagctaccagtgtgggctggtgttccgtgcctgctgtgtgaaggcccgggagaattcagactttgtccaaggcaacggtgcagaccttcaggacccagctaagattcctgacgaggaggaccaagaagacccgtacctgaatgaccgctgtcgaggtggcgggccctgtaagcagcagtgccgtgacactggggacgaggtgatctgctcttgctttgtgggctaccagctgcagtcggatggtgtctcctgcgaagatatcaatgaatgcatcacaggcagccataactgccggctgggagaatcctgcatcaatacagtgggctctttccgctgccagcgggacagcagctgtgggactggctatgagctcacagaggataataactgcaaagatattgacgaatgtgagactggtattcataactgcccccccgattttatctgtcagaatactctgggatccttccgttgcagaccgaagctgcagtgcaagagcggcttcatacaggatgctctaggcaactgcattgatatcaatgagtgtttaagtatcagtgctccatgccctgtggggcagacatgcatcaatacagagggctcctacacatgccagaagaatgtgcccaactgtggccgtggttatcatctcaatgaagaggggacccgctgtgttgatgtggatgagtgcgccccaccagcggagccctgtgggaagggacaccactgcctgaactcccccggcagcttccgctgcgagtgcaaggctggcttctattttgatggcatcagcaggacctgcgtggatatcaacgagtgccagcgctatcccgggcgcctgtgtggccacaagtgtgagaacacgccaggctccttccactgcagctgctccgccggcttccggctgtctgtggacggccggtcttgtgaagatgtgaacgagtgtctcaacagcccttgcagccaggagtgtgctaatgtctatggctcctaccagtgctattgccgacgaggttaccagctcagtgacgtggatggggtcacctgcgaagatattgatgagtgtgccctgcccactggaggtcacatctgctcctaccgctgcatcaacatccccggaagcttccagtgcagctgcccctcatctggctacaggctagctcccaatggccgcaactgccaagacattgatgagtgtgtgaccggcatccataactgttccatcaatgagacttgcttcaacatccagggcagcttccgctgtctgtcctttgaatgccccgagaactatcgccgctccgcagacaccttccgccaagagaaaacagacaccgtccgctgcatcaagtcttgccgtcccaacgatgaggcctgcgtgcgggaccctgtacataccgtctcccacaccgtcatctcgctgcccacctttcgagagttcacccgtcctgaggagatcatctttctgagggctgtcacaccgctgtaccccgccaaccaggccgacatcatcttcgacatcacagaagggaaccttcgagactcctttgatatcatcaagcgctatgaggacggcatgactgtgggtgtcgtgcgccaagtgcggcccatcgtgggcccgttttacgctgtcctgaagctggagatgaactacgtgttgggaggcgtagtttcccaccggaacgtcgtcaatgtacacatcttcgtctccgagtactggttctgagggccgggttgcggctcagccaggagtgtgccacgcccttgctgccagtgacagccaggtgcctgtctctacccctcgggcctcccttgatgtttcatattggtttgtatggccacgtgcattaggctgagccgaatcacttaagtccagctggtgtactgtggcgtttaaacatggctcagccaggtggttgaatcattgcttttttttttttttaaatgcaaaggccaaagcggaattttgttcccttttctacctgtgagctaggcattgctaaggaccaattgaaggagttttcaaagcagactccacccgaaagccgaggcagccagttctcactgagtctgcatgaggattggcattttggtacttttttttttttaaccaactgggctctttgtgtttcaagttgatggctgctgtagagtggcgcataaataaatgtacaataaattctccccagaaaaa

SEQ ID NO: 166 - DNA, 2710 bp, Mus musculus
  misc_feature (1921)..(1921): n is a, c, g, or t
gaattcagatataattcaagcttgttagagggctttaaaaaaaaaagttgattcggtgcatgaaagcaagttaactactgctgctcaccgttgagagacttacaggtgcttgcctgaactgcaataaaggactcatattattgagcaggacttatttatctcttcattttggagagcctcataaactgttattacagtttctctactgactttgaaaagtttgaagtttggaagagacacctgtgcagctaacaaagcatgagcacggccagaacagagaaccctgttatcatgggtctgtccagtcagaacggccagctgaggggccctgtgaaggccagtgctggccctggaggagggggcacacagccacagccacagctgaaccagttgaagaacaccagcacaatcaataatggcactccacagcaagcccagagcatggccgccactattaaacctggtgatgactggaaaaagacattaaaactccctccaaaggatctaagaatcaaaacttcggatgtgacctccacaaaaggaaatgagtttgaagattactgtttgaaacgagagttgctaatgggaatttttgaaatgggctgggaaaaaccatctcctatccaggaggagagcattcccattgctttatctggtagggatatcttagctagagcaaaaaatggaacaggcaaaagcggtgcctacctcatccccttacttgaaaggctggacctgaagaaggacaatattcaagcaatggtgattgttcccactagagaacttgctctacaggtcagtcagatttgcatccaggtcagcaaacacatgggaggggccaaagtgatggcaaccaccggaggaaccaatttacgagatgacataatgaggcttgatgatacagtgcatgtggtgatcgctacccctggcaggatcctggatctcatcaagaaaggcgtggcaaaggttgaccatgtccagatgatagtgctagatgaggcagataaattgttgtcacaggattttgtgcagataatggaggatattattctcacactacctaaaaataggcagattttactatattccgctactttccctcttagtgtacaaaagtttatgaattcccatctgcaaaaaccctacgagataaacctgatggaggaactaactctgaaaggagtaactcagtactacgcatatgtaacggagcgccaaaaagtgcactgcctcaatacacttttctccaggcttcagataaaccagtccatcattttctgcaactcctcccagagagtcgagctactcgccaagaagatttctcagctgggctactcttgcttttatatccatgctaaaatgaggcaggaacatcgaaatcgtgtctttcatgatttccgaaatggcttatgccgcaatcttgtttgcactgatctgtttacccgaggtattgatatacaagctgtgaatgtggtaataaactttgacttcccaaagctggcagagacctatcttcatcgtattggaagatcaggtcgctttggtcatcttggcttagccatcaacttgatcacttatgatgatcgcttcaacctgaagagtattgaggagcagctggggacagagatcaaacccatcccaagcaacatcgacaagagcctgtatgtggcagaataccacagtgagcctgcagaagacgagaaaccgtaacaagcacgctttgacaaactacagaaggctctttggatctgtgacacatcattttgggggggtgctcttctctttgtgggttttttcatctttattttggaactatgaagagttatataagagctcagacatttttcttttttttaaactggtgaagaaaaactgaaaagaagacatagaccttttttgttccacttgtttgcactgtgtntgactgaacattcgttgcactaactgctggtctttaaagatgttttctggggaaaggggacaaggaaggaggaaaagaaaagaaggggagaaaccctaaaaaagagaagaatttgggtgaacacgtgcacctgtctaaagttctccactagctgactctactgcatttcaacttctccctgattattcatccgtttttaagcctgaagagcttattacttatttgtgcgaagtgccttatgctacaagaccattaagaatatcatctttacacacagcccaaggaatcaacagagtcatgttctattttcttttttatttctttgcctcttcattttggtttcacgttgaagtctcacctcctgttctaccagtactcagcccagggccggaaggtggactagtgatggcagccgtcggcatcgtttatggtcggaactacgacggtatctgatcgtcttcgaacctccgactttcgttcttgattaatgaaaacattcttggcaaatgctttcgctctggtccgtcttgcgccggtccaagaatttcacctctagcggcgcaatacgaatgcccccggccgtccctcttaatcatggcctcagttccgaaaaccaacaaaatagaaccgcggtcctattccattattcctagctgcggtatccaggcggctcgggcctgctttgaacactctaattttttcaaagtaaacgttcgggccccgcgggacactcagctaagagcatcgagggggcgccgagaggcaaggggcggggacgggacggtgact

SEQ ID NO: 167 - DNA, 3350 bp, Mus musculus
aattcatttatctgcaggaatgattgctgctatcagtctcgcgctcaccgcccggctgaggaggtgaaagtttctccccaggaagataaaccgcaaaagacaatattgtgcatgatttgcgccttttcttttcttttttctccccctcctttttttttttttttcaaaaagcagagagggggaaaaagggagagttgaaggatcgaggaggagagcctgagagagagagagagagagagagagagagagagagaagagagagagagagagagagagagagagagagagagagagtgagagagagagagactgagactagtggagaagtgaggaggggcgcgctgcgcgaggagacagggcgagcagtggcggctctggcgttcacattcctctatgccacaaatccgggaagaagttttattggggggctgagatgttctatgcctttccccgggcagccttgattcgaggccctctcggcagagactgagcggcgagaaagtgagagcccggcccgcgcggttcgagcggctggcgctggagcccgccttctaccggccggcagtcatctctcttgcctgcctttggccgggcgggtgccggctagcgcctggccgttgcctgctggctgagacttcgttaggtgggtcgactccccctccctcctcctcttcttcctcctcttcctccgcctcccgttcctcctcctcctgatcttccctccttggcgggcgagggtgggggggggcgggggaggccggggcttgccccgtgcagccacgatgctcctggacgccggaccccagtatcccgcgattggtgtgaccacctttggtgcatcccggcaccactcggcgggcgacgtggccgagagagacgtgggcctgggtatcaacccgttcgccgacggcatgggcgccttcaagctcaaccccagttcgcacgaactggcctcggctggccagacagccttcacgtcgcaggctccgggctacgccgctgctgcggccctgggccaccatcaccaccccggccacgtcggctcctactccagcgctgctttcaattctacccgggactttctgttccgcaaccggggcttcggcgacgcggcggcggcagctagcgcccagcacagtctcttcgctgcttcggccggcggctttgggggcccacacggccatacggacgccgcgggccacctccttttttctgggcttcacgagcaggcggctggccacgcttcgcccaacgtggttaacgggcagatgcggctaggtttctccggggacatgtacccacggccggaacagtacggccaggtgaccagcccgcgatccgagcactatgctgccccgcagcttcacggctatgggcccatgaacgtgaacatggctgcacatcacggggctggagccttcttccgctatatgcgccaacccatcaagcaagagcttatctgtaaatggatcgagccggagcagctggccaaccccaaaaagtcgtgcaacaaaactttcagcaccatgcacgagctggtcacgcacgtcacggtggagcacgtcggcggcccagagcagagcaaccacatctgcttctgggaggagtgtccacgcgagggcaagcccttcaaagccaaatacaaactggtcaaccacatccgagtgcacacaggcgaaaagccttttccctgcccgtttcctggctgcggcaaggttttcgcgcgttcagagaacctcaagatccacaaaaggacacacacaggggagaagcccttcaagtgcgagttcgagggctgcgaccggcgcttcgccaacagcagcgaccgcaagaagcacatgcacgtgcacacgagcgacaagccctacctttgcaagatgtgcgataagtcctacacgcaccccagctctctgcgtaaacacatgaaggtccatgagtcctcttctcagggctcacagccttcgcccgccgccagctcggggtatgagtcgtccacgccacccaccatcgtgtctcccacaacagacaacccgaccaccagctccatgtcgccctcctcctccgcggttcaccacacagccggccacagcgcgctctcttccaattttaacgaatggtacgtttaaaatcagaaacaaaacatgccgaccccctatttaagagactgaacacacacgtatatacgccgtattattgaaagaatcctgaaactcgagacacccctcgtcccgatcccgcaaacgtttttatttttatttttgttgttgttgttgtttgtttgattttgtttttaaatctgccggtaaatccaggactgagtaaaacagaggaggcagcaagcctttaggttttttcactccaaatttttccttcccccacccacctctgaaaaggtttggtagctgaagggcggaagggggtggaagagaaggcggctgcctgaccgaacaccgccaaaggccccagggccaatttcttgttggatcagaacaagctctctggggcttcagcttttctttatctttttgttttgttttcttgtaaatacagaattattagcttaaatctgttctgttggattctgtatatagctacacttcggttggagtgggtgggtgggatcgtggcgtggtggtctttgccttggggaggggagggccagagggagggggagggggaggggaggggcggccgaaagccaactgtttgtactgaatggcaagaatgttctagtaaatgtgtaccaaaatgtgaactactttgtacgattacagtctccacgtcgacctaacagaatattattgatattaatgtgcttttttttgtataaagtgcaaacatttcgtcccaaagtctgagtactttagtgcagtaaaatgttgtttcatgtcctgtcaagaattcgtatagtacgagcctggatctacgtgtcaaactgttccatttgtttatgtaaagtgatattaaaaagatataaactatagctgtccattgcttttggcaaaatatacaaccacacaatgtatataattcctagtttccatatttatccgcatgtaaagggtctggtttattcatgttacagctattcaatatttatggctagtaaaaaaaaaaaaaaaactcgtatgtacactttagtttccagaactgtttggtaacctttcgtacgttattaaagattcttaaatctcagtgattgtggtaggaatttcttcgtcacgctcccttcccccagcaacctgtgccagctttagtggatcttgggaaagctctccagcctctcttgccttcttctctgtcattgctggtcatataaacttgataaatgaacgctaccctgctggctc

SEQ ID NO: 168 - DNA, 1648 bp, Mus musculus
  misc_feature (1550)..(1550): n is a, c, g, or t
  misc_feature (1572)..(1572): n is a, c, g, or t
  misc_feature (1621)..(1621): n is a, c, g, or t
  misc_feature (1626)..(1626): n is a, c, g, or t
gaattcgggagctgccgcaaccacagttccgggatgcaggccctggtgctactcctctggactggagccctgctcgggcacggcagcagccagaacgtccccagcagctctgagggctccccagtcccggacagcacgggcgagcccgtggaggaggaggaccccttcttcaaggtccctgtgaacaagctggcagcagctgtctccaacttcggctacgatctgtaccgcctgagatccggtgccagcccaacgggcaacgtcctgctgtctccactcagcgtggccacggccctctctgccctttctctgggagctgaacatcgaacagagtctgtcattcaccgggctctctactacgacctgatcaccaaccctgacatccacagcacctacaaggagctccttgcctctgttactgcccctgagaagaacctcaagcgtgcttccagaattgtgtttgagaggaaacttcgagtcaaatccagctttgttgcccctctggagaagtcctatgggaccaggccccggatcctcacgggcaaccctcgagtagaccttcaggagattaacaactgggtgcaggcccagatgaaagggaagattgcccggtccacgagggaaatgcccagtgccctcagcatccttctccttggcgtggcttacttcaaggggcagtgggtaaccaagtttgactcgagaaagacgaccctccaggattttcatttggacgaggacaggaccgtgagagtccccatgatgtcagatcctaaggccatcttacgatacggcttggactctgatctcaactgcaagattgcccagctgcccttgacaggaagtatgagcatcatcttcttcctgcccctgaccgtgacccagaacttgaccatgatagaagagagcctcacctctgagttcattcatgacatcgaccgagaactgaagactatccaagctgtgctgactgtccccaagctgaagctgagcttcgaaggcgaacttaccaagtctctgcaggacatgaagctacagtcgttgtttgaatcacccgacttcagcaagattactggcaaacccgtgaagctcacccaagtggaacacagggctgctttcgagtggaatgaagagggggcaggaagcagccccagcccaggcctcttgcccgtccgcctcaccttcccgctagactatcaccttaaccaacctttcctctttgttctgagggacacggacacgggggccctcctcttcataggcagaatcctggaccccagtagcacttaatgtctcagtgctctacagaacccccagagggaagctgattatacattccaggaaggcggccggtagcttcagtgtagcctctgcaataaaagagcttttcttaatgtttgcttcttccttctcctgtttgaagctgtttcatatggagagaaactggtccttatgaatttacatacttgtaacatgaacgggctctgcttaagctctgccaaagtcaccatttcctggtctcggagtgcaggtggatgaggaagaggaacgtnctgccccaggagggcccccgtncccggagggcaccttcacacacaattactaacactgctgtggggtcctnactgnctcttactactacaaatatctg

SEQ ID NO: 169 - DNA, 18099 bp, Mus musculus
cggccacttggagcagctctgccgcggggactgcactgtccgccctgccagacccgccccgactggggctcgccgtcgccagcagtcagcactgcgacctcgggcccttcgccggctatggctgcgtcctggggctgagcccgcaggttgtgtgaccaagattcgcaaagaaagagagagagagaccgatacagaaagagaagaaggaggggcgggctcctggcaaggcgtttgctcctgagcagagtcctgcaaagatggagaaggaggaagagacaacccgggagctgctgctgcccaactggcagggcagtggttcccacgggctgaccattgcccagagggatgatggagtctttgttcaggaggtgatgcagaactcccctgcggcccgcactggggtggtcaaggagggggaccagattgtgggtgccaccatctactttgacaacctgcagtctggtgaggtgacccagttgctgaataccatggggcatcacactgttggcttgaagttgcaccgtaaaggggaccgttcccctgagcctggacagacctggacccatgaagtcttcagttcccgtagctctgaagtggttctgagcggggatgatgaggactaccagcgcatctacaccacgaagatcaagccacgcctgaggtcggaggatggagtagaaggggaccttggggagacccagagccgcaccatcacagtgactagaagggttacagcctacactgtggatgtgaccggtcgggaaggagtgaaggacattgacatcaccagccctgagttcatgatcaagataccaaggcatgaagtgactgaaatctccaacacagatgtggaaacccagccagggaaaacggtgatccgactgccatcgggatccgggccagcctctccaaccacaggctctgctgtggatatccgggcaggtgccatttctgcttcaggaccagagcttgaaggtgctggccactcaaaattccaggtcactgtgcctggggcaaaggtgggaagcctagatgtcaatgtcaaagcaaaaggcttggacttgggtggcaaaggagggatccgagttccaggagtagacgtttcgtcttctcttggggctggctcagtagaggtacaggccccatccctccagagtggtgatattgggaaaattaaaattcctaccatgaaggtgccaaaatttggtgtctccgcaggtctggatggccagattccagaggtagggctgagtgtttctgcacctgaatcctctgtgggacacaagggtgacaagccaggcttggctattgggggaaacatccaggctcctcacctggaagtaaatccctcctctgtcaatattgaggggcttgaggggaaactgaagggtccccagatcactgggccatcacttgaaggtgacttaggcctgaaaggtaccaagctgcaagggaacataggaatggatgcctgtgcttccaaaatcgagggcagcatcactggtcctagtgtggaaatcggaacccctgatgttgatgttcatgggctagggggcaaactgaatatgcccaagatgaaagtccctaagttctctgcatcaggttcaaagggagaggggattggccttgatgtggcactgcccacaggtgaagtgacccttcctggggtctctggggatgtaagtctgcctgagattgctactggtgggctcgaagggaagatgaagggtgctaaagtcaagactcctgaaatgatcatccagaaacctaaaatctccatgcaggatgtggatctgagcctggggtcctgtaaactgaaaggaaatatgaagacatctgctcctgaggtgaaaggtgatgttaaaggccctcagatggcagttaaaggctccagagtggacatagagacaccaaacttagaggggaccttgacaggtcccaagatcagcagcccttctggaaaaataggggcctgtaggatttctatggcagatgtagacttaaatgtagctgcacctaaagggaaagggggtgtagatgtcattctccccaatgtagaaggaaaagccaaaggtcttgaagttgatgtcaaaggccccaaaatggacatcagtgctccagatgtagaagtccatggtccagaatggaatttgaagatgcccaagttcagtgtcccaggagtcaaaggagaaggcctagatgtaaatgttactctgcccgaaggagatattagtatttcggggcctaaggtcaatgtagaagctccaaacgtcaacatggagggtctgggtggcaaacttaaaggccctgacattaatcttcctgaagtaagtgtcaagactccaaagatttctatgcctgatgtggatctgcatatcaaagggccaaaggtgaagggagagtatgaagtaacaccaccaaagcttgagggggaactgaaaggctccaaagtggacattgacaccccacaagtggatgttcatggcccagacctgaagattcccaagatgaaaatgcccaaattcagtgtgccagggttcaaagcagagggcccagaagtggatgtgaacctgcccaaggctgaccttgacatttctgggactaaggtggaagtcagtgctccagatgtaagcattgaaggatcagaagggaagttgaaagggcataagtttaaaatgcctgaaatgaatatcagagctccaaagatctccatgccagatgtggacttacacttaaaaggccccaatgtaaagggagaatatgatgtcacagtgccaagggcagaaggtgagattaaagttcctgatgttgaacttaaaagtgctaaactggacattgatgttccaaatgtggatgttcaaggtcctgaattgcatatgaagatgcccaagataaaaatgcccaagtttggcatgccaggcttcaaggcagagagcccagaaatggaggtgaatctcccaaagtctgacattgatgtctcaggacccaatgtggatgtcaaagttccagatgtgaacattgaaggacctgaaggaaagctgaagggtcctaagctgaagatgcctgagatgaacatcaaggccccaaagatatccatgcctgatgtggatttgcatatgaaaggccccaaagttaaaggagaatatgatgtcacaatgccaaagctggaaggagacttgaaaggccccaaagtagatgtcagtgttccagatgttgatgttcatggtcccgactggaacttgaaaatgccaaagattaaaatgcccaaattcagcatgcctagtctcaaaggtgaaggcccagagttggatgtgaacatgcccaaggctgatgtggacatttctgtaccaaagctagatattagtgctccagatctgaaccttgagggaccagaagggaagttgaaaggccccaaatttaagatgcctgagatgcacttcaaggctccaaaggtgtctctaccagatgtggatctggatctcaaaggacccaaaatgaaaggaaatctagacatgtctgcaccaaaaatagagggagagatgaaagctccagatgtggacattaaaggtccaaatgtagatattaaagcaccagaagtggatgtgcaaggcccagaatggagcctgaagatgccaaagatgaaaatgcccaagttcagtatgcctactctcaaaggtgagggtccagatgtggatgtgagcttgcctaaggctactattgatgtctcaggacctaaacttgacattgaaacctcagatgtgagccttgagggaccagaaggaaagctgaagggccccaagtttaagatgcctgacatgcacttcaaggcacccaagatctccatgcctgatgtggacttaaacatgaagggccccaaagtcaagggggacatggatgtgacagtgcccaagatagaaggtgaaatgaaagtgccagatgtggatatcaaaggccctaaagtggacatcagtgccccagatgtggatgtacaaggcccagactggcacctgaagatgcccaagatgaaaatgcctaagttcagcatgcctggcttcaaagcagagggcccagaagtgagcctgcccaaggctgaccttgatgtctcaggacccaaggtggacattgatgttcctgatgtgaatattgaaggtccagatgcaaagctgaagggccccaagttcaagatgcctgagatgaacatcaaggctccaaagatctccatgccagatttacatcttaagggtcccaaagtgaagggtgatgtagatgtttccctgcccaaagtggaaggtgacctcaaaggcccagacattgacatcaaaggtcccaaaatggacatcaatgctccagatatggacgtgcagggcccagactggcacctgaagatgcccaagatgaaaatgcccaagttcagcatgcctggcttcaaagcagagggcccagaagtggatgtgaatctgcccaaggctgacattgatgtctcagggcccaaagttgatattgaggccccagatgtgagcatcgagggaccagaagggaagctgaagggccccaagtttaagatgcctgacatgcacttcaaggcccccaagatctccatgcctgatgtggacttgaatattaaggggcccaaaggaaaagcagatgtggatgcatcattgcctgaggtagaaggtggagtaaaagtgccagatgtggacattaaaggacccaaagttggcattgatgctccagatgttgaggttcatggcccagactggcaccttaagatgcccaaggtgaaaatgcccaagttcagcatgcctggcttcaaaggagaaggtccagaagtagacatccccaaggccaacattgatgtttcaggacccaaggtagacatcgatgttccagatgtaaatattgaaggtccagatacaaaactaaaaggtccaaaatttaagatgccagaaatgaacataaagcctcagaagatatccatgccagatgttagcttgaatttgaaaggccctaaggtaaaagcagattgtgatgtctcagttccaaaagtgggaggagaaataaaagctcctgctgttgacatcaaaggtcctaaagtagaggcaccagatgtggaagttcatggcccagactggcacctgaagatgcccaaggtcaaaatgcctaagttcagcatgcctggcttcaaaggagagggtgcagaagtagatgtgaatcttcaaaaggccaatattgatgtctcaggacccaaggtggacattgatgttccagatgtgaatattgaagggccagaagggaaactaaagggtcccaagttcaagatgccaagcatgaatatacagacacacaaaatctctatgcctgatgttgggcttaatttgaaaggacctaaactgaaaagtggtgtagatgtttctcttccaaaagtagagggagaattgaagggtcctgaagttgatgtggatgttggtgatattgatattgaatgtccagaagggaagctgaagggtcccaagtttaagatgcctgacatgcacttcaagactcctaagatctccatgcctgatgtagatttacatctgaaaggccccaaagtcaagggggatatggatgtgacaatgcccaagatagaaggtgaaatgaaagttccagatgtggacatcaaaggccccaaagtggacatcaatgccccagatgtagatgtgcgtggcccagactggcacctgaagatgcccaaggtgaaaatgcctaagttcagcatgcctggtttcaaagcagagggccctgaagtggatgtgaacctgcccaaggctgacattgatgtctcaggacccaaagtggacattgatgttcctgacttagatattgagggtccagaaggaaaactgaaaggctccaaatttaagatgcctaagttgaatatcaaggccgccaagatctctatgcccgatgtggacttgaattttaaggggcccaaactgaaaggagagatagatgcttctgtgccagaaatggaagctgatctcagaggccctcaagttgacatcaaagggaccaatgtggatgtgaaagtacctgatgttgatctggaatgtcctgatgcaaagttgaaaggccccaagttcaagatgcctgacatgcacttcaaggctcctaagatctccatgcctgatgtggacttgcatctgaaaggccccaaagtcaagggggacatggatgtgacagtgccaaaattagagggagaattaaaaggcccaagtgtggatgtggaagtacctgatgttgatctggaatgtcctgatgcaaagttgaaaggccccaagttcaagatgcctgacatgcacttcaaggctcctaagatctccatgcctgatgtggacttgcatctgaaaggccccaaagtcaagggggacatggatgtgacagtgccaaaattagagggagaattaaaaggcccaagtgtggatgtggaagtacctgatgttgatctggaatgtcctgatgcaaagttgaaaggccccaagttcaagatgcctgacatgcacttcaaggctcctaagatctccatgcctgatgtggacttgcatctgaaaggccccaaagtcaagggtgacgtggatgtgacagtgccaaaattagagggagaattaaaaggcccaagtgtggatgtggaagtacctgatgttgatctggaatgtcctgatgcaaagttgaaaggccccaagttcaagatgcctgacatgcacttcaaggctcctaagatctccatgcctgatgtggacttgcatctgaaaggccccaaagtcaagggggacatggatgtgacagtgcccaagatagaaggtgagatgaaagtgccagatgtggatatcaaaggccctaaagtggacatcaatgccccagatgtggatgtgcgtggcccagactggcacctgaagatgcccaagatgaaaatgcccaagttcagcatgcctggcttcaaagcagagggcccagaagtggatgtgaacttgcccaaggctgacattgatgtctcaggacccaaggtggacattgatgttccagatgtgaatattgaagggccagaagggaagctgaagggccccaaatttaagatgcctgacatgcacttcaaggcccccaagatctccatgcctgatgttgatttcaacttaaagggtcctaaaatcaaaggagatattgacgtttcagtccctaagattgaaggagaattaaagggtccagaactggatctcaagggccccaaattggatgccaacataccagaagttgctgttgaaggcccagaaggtaaatggaaaagccccaagttcaagatgccagacatgcacttcaaaactcccaaaatctccatgccagacattgatcttcacttaaagagtccaaagataaagggggaggtggatgtagatgttcccaaattggaaggagacctcaaagggccaaatgtggacatgagcaggccagacattgagattgaaggaccagagggcaaattgaaaggcccgaagttcaaaatgcctgagatgaacatcaaggctcccaagatctccatgcctgactttgatttgcatcttaagggtcctaaagtgaagggtgatgtagatatttctctgcccaaagtagaaggtgacatcaaaggcccagaggttgacatcaaaggtcccaaagtggatatcaatgctccagatgtggacgtgcagggcccagactggcacctgaagatgcccaaaatgaaaatgcccaagttcagcatgcctggcttcaaagcagagggcccagaagtggatgtgaacttgcccaaggctgacattgatgtctcaggacccaaggtggacattgatgttcctgatgtgaacattgaagggccagatgcaaaactgaagggccccaagttcaagatgcctgagatgaacatcaaggcccccaagatctccatgcctgacattgacttaaacctgaaaggccccaaagtgaagggtgatgtggatgtgtctctgcccaaagtggaaggtgagattaaagttcctgaagttgacatcaaaggccccaaagtggacattgatgttccagatgtggatgtccatggcccagactggcacctgaagatgcccaaaataaaaatgcccaagttcagcatgcctggcttcaagggagaaggccctgaagtagatgtgagcctgcccaatgctgaccttgatgtctcaggacccaaggtggacattgatgttccagatgtgaatattgaaggtccagatgcaaagctgaagggccccaagttcaagatgcctgagatgaacatcaaggctccaaagatctccatgccagatttacatcttaagggtcccaaagtgaagggtgatgtagatgtttccctgcccaaagtggaaggtgacctcaaaggcccagatgttgacatcaaaggtcccaaaatggacatcaatgctccagatatggacgtgcagggcccagactggcacctgaagatgcccaaaatgaaaatgcccaagttcagcatgcctggcttcaaagcagagggtccagaagtagatgtgaacctgcccaaggctgaccttgatgtctcaggacccaaggtggacattgatgttccagatgtgaacattgaagggccagatgcaaaactgaaaggccccaagttcaagatgcctgagatgaacatcaaggcccccaagatctccatgcctgacattgacttaaacctgaaaggccccaaagtgaagggtgatgtggatatgtctctgcccaaagtggaaggtgagattaaagttcctgaagttgacatcaaaggccccaaagtggacattgatgttccagatgtggatgttcatggcccagactggcacctgaagatgcccaaggtgaaaatgcccaagttcagcatgcctggcttcaagggagaaggccctgaagtagatgtgaacctgcccaaggctgaccttgatgtctcaggacccaaggtggacattgatgttcctgatgtgaatattgaagggccagatgcaaaactgaagggtcccaagtttaagatgccagaggtgaacataaaggctcctaagatctccatgccagatttgaatcttaatcttaaaggccccaatgtgaaaggagatgtggatgtttccattccaaatatagagggtgatttgaaaggcccttctcttgacataaagagcccaaaattagatgtaaatgctccagatattgatgttcatggtcctgaaggaaaattaaagggtcccaaactgaaaatgcctgacatgcatgtaagcatgcccaagatctctatgccagaaattgacttgaatttaaagggctcaaaggtcaagggagatgttgatatctctggacccaaactggagggtgacattaaagttcccagggtggatttgaagggcccagaagtggacatttctgctcccaaggtcaatattgatgggaaagcaaagaaatctcgttttaagcttcctaaatttaatttttctgggtccaaagttcaaacacctgaagtggatgtcaaacttaaaaagccagatgttgatataacagctccaaaagttgatattaatgctccagaagttgaagtccaaggtaaagtgaaaggatccaagtttaaaatgccctttctgagcatttcatctcccaaagtctccatgcccgatgtggagctaaacttgaagggtcctaaagtcaaaggagacctagatgcagcaggcccaaatttagaaggagacttcaaaggacccaaagtggacattaaagcaccagatgttcaacttaatgcaccagatgtggatgttcatggaccagaatggaatctaaaaatgcccaaaatgaaaatgcccaagtttggtgtgtctggcataaaagcagaagggcctgatgtggctgtggatttaccaaaaggagacattaatatagaaggtcccagtatgaatattgagggcccagaactcaatgtagaatgtccagagggaagcttaaaaggccccaaatttaagatgcctgagatgaacatcaaagcccctaagatctccatgcctgatattgacttaaacctgaaaggtcccaaagtgaagggtgatgtggatgtgtctctacccaaagtggaaggtgagattaaagttcctgaagttgacatcaaaggccccaaagtggacattgatgttccagatgtggatgttcatggcccagactggcacctgaagatgcccaaggtgaaaatgcccaagttcagcatgcctggcttcaaaggagagggcccagaagtggatgtgagcctgcctaaggctaacattgatgtctcaggacccaaggtggacattgatgttccagatgtgaacattgaagggccagatgcaaaactgaagggccccaagttcaagatgcctgagatgaacatcaaggctccaaagatctccatgcctgatattgacttaaacctgaaaggccccaaagtgaagggtgatgtggatgtgtctctgcccaaagtggaaggtgagattaaagttcctgaagttgacatcaaaggccccaaagtggacattgatgttccagatgtggatgttcatggcccagactggcacctgaagatgcccaaaataaaaatgcccaagttcagcatgcctggcttcaagggagaaggccctgaagtagatgtgagcctgcctaaggctgaccttgatgtctcaggacccaaggtggacattgatgttccagatgtgaatattgaagggccagatgcaaaactgaaaggccccaagttcaagatgcctgagatgaacatcaaggcccccaagatctccatgcctgacattgacttaaacctgaaaggccccaaagtgaagggtgatgtggatgtgtctctgcccaaagtggaaggtgagattaaagttcctgaagttgacatcaaagaccccaaagtggacattgatgttccagatgtggatgtccatggcccagactggcacctgaagatgcccaaaataaaaatgcccaagttcagcatgcctggcttcaaaggagaaggcccagaagtggatgtaaatctgcccaaggctgaccttgatgtctcaggacccaaggtggacattgatgttcctgatgtgaatattgaaggtccagatgcaaagctgaagggccccaagttcaagatgcctgagatgaacatcaaggctccaaagatctccatgccagatttacatcttaagggtcccaaagtgaagggtgatgtagatgtttccctgcccaaagtggaaggtgacctcaaaggcccagatgttgacatcaaaggtcccaaaatggacatcaatgctccagatatggacgtgcagggcccagactggcacctgaagatgcccaaaatgaaaatgcccaagttcagcatgcctggcttcaaagcagagggcccagaagtggatgtgaacctgcccaaggttgaccttgatgtctcaggacccaaggtggacattgatgttcctgatgtgaatattgaaggaccagatgcaaaactgaagggtcccaagttcaagatgcctgagatgaacatcaaggcccccaagatctccatgcctgacattgacttaaacctgaaaggccccaaagtgaagggtgatgtggatatgtctctgcccaaagtggaaggtgagattaaagtccctgaagttgacatcaaaggccccaaagtggacattgatgttccagatgtggatgttcatggcccagactggcacttgaagatgcccaaggtgaaaatgcccaagttcagcatgcctggcttcaagggagaaggccctgaagtagatgtgaacctgcccaaggctgaccttgatgtctcaggacccaaggtggacattgatgttcctgatgtgaatattgaaggtccagatgcaaagctgaagggtcctaagttcaagatgcctgagatgaacatcaaggctccaaagatctccatgccagatttacatcttaagggtcccaaagtgaagggtgatgtagatgtttccctgcccaaagtggaaggtgatctcaaaggcccagaggttgacatcaaaggtcccaaaatggacatcagtgcccccgatgttgatgtacatggtcctgactggcacttgaagatgcctaaggtgaaaatgcctaagttcagcatgcctggcttcaaaggagaaggtccagaagtggatgtaaatctgcccaaggctgaccttgatgtctcaggacccaaggtggacattgaaggccctaatgttaatattgaaggaccagaagggaaactgaagggccctaagtttaaaatgcctgatctccaccttaaggcacccaagatttcaatgccagaaattgacctgaacctgaaaggaccaaagttgaagggtgatgtagatgtttctttacctaaagtggaaggagacctcaaaggccctgaagttgatatcaaaggtcccaaagtggacatcagtgccccagatatggatgttcatggcccagattggcacctgaagatgcccaagatgaaaatgcctaagttcagcatgcctggcttcaaagcagagggcccagaagtggatgtaaatctgcccaaggctgacattgatgtctcagggcctaaagtggacattgatgttcctgatgtgaacattgaaggaccagatgcaaagctgaagggtcccaagttcaagatgcctgagatgaacataaaagctcccaagatctctatgcctgactttgatttgcatctgaaaggtcccaaagtgaagggtgatgtggatgcttccttgcctaaaatggaaggtgaattaaagggtcctggtattgatataaagtgccccactgtggatattgacactcctgatgtcaatattgaagttccagaaggaaaattaaaaggacccaaatttaaaatgccagacatgcatatcaaagctcccaagatctccatgcctgactttgatttaaatctaaaaggacctaaagttaagggagatgtggaccttgcactccctaatgttgaaggtgatcttaaagggccagaaatagacattgagggtcctgaaggaaaactcaaaggccccaaatttaaggtgccagatgtccaattcaaaactccacaaatctcaatgagtgacattgatttgaatgtgaaagggcctaagataaaaggagatttggacatttctattcctaaaccagaaggggacttgaaaggtcccaaagtggatatcaaaggccctaaactggacattgacactcctgatattgacattcatggtccagaagggaaactgaagggccctaaatttaaaatgcctgatctacacctcaaggcacccaagatttcaatgccagaagttgacctgaacctgaaagggccaaaggtgaagggtgatgtagatgtttctctaccaaaagtggaaggagacctcaaaggtcctgaagttgatatcaaaggtcccaaagtggacatcagtgccccagatgtggatgttcatggcccagactggcacctgaagatgcccaaggtgaaaatgcccaagttcagcatgcctggcttcaaaggagagggcccagaagtggatgtgagcctgcctaaggctaacattgatgtctcaggacccaaggtggacattgatgttcctgatgtgaacattgaagggccagatgcaaaactgaagggccccaagttcaagatgcctgagatgaacatcaaggctcccaagatctccatgcctgatattgacttaaacctgaaaggccccaaagtgaagggtgatgtggatgtgtctctgcctaaagtggaaggtgagattaaagttcctgaagttgacatcaaaggccccaaagtggacattgatgttccagatgtggatgttcatggcccagactggcacctgaagatgcccaaggtgaaaatgcccaagttcagcatgcctggcttcaaaggagagggcccagaagtggatgtaaatctgcccaaggctgaccttgatgtttcaggacccaaggtggacattgatgttccagatgttaatgttgagggtccagatatgaaagtaaaaggtcccaaattcaggatgcctgagattaacatcaaggctcccaagatctctatgcctgatgttgatctggagttaaaaggacccaaagtaaaaggagcctttgatgggtctgtccctaagattgaaggtactctcaaaggacctgaaatagatatgaaaggtccaggtctggattttgaaggccctgatgctaaacttagtgggcctaacttgaagatgccatcgctggaggtatctgttcctaaaataactgggcctgatgctaatgtgcaccttaagacaccgaaagttggaatttctgcgcctaagttaggaggtggtgaggtagacctcaaggggcctaaagttgatttagaaactccaagcttagatgtccacatggaaagccctgatattaatattgaggggccggatgttaaagttccgaaatttaagaaacccaagtttggatttggtgcaaaaagccccaaagctgacatcaagacacccacagttgatgtgactgtccctgaagcagagctgaatgttgattctcctgaaataaacattggtggcaagagcaagaaaagcaagtttaaaatgcctaaaattcacatgagtggtcctaaagttaaagccaaaaaacagggatttgatttgaatattcctggaggtgagattgataccagtctcaaagctcctgatgtagatgttagtgttgcagggcctgatgctgcactcaaagctgaagtaaaatctcccaaagtcaagaaaactatgtttggaaaaatgtactttccagatgtagaatttgacattaagtcacctaaatttaaagcagaggctcccctacctagccccaagctggagggtgaaatcaaggtaccagatgtggatatttcttcaccagggattaatgtggaagctcctgatattcatatgaaggctcccaagttcaaggtgccaggcgtggaagcctcagggccaaagatagagggcaacttgaaaggtcccaaggtgcaggcaaacttggacacacctgacatcaacatcgaaggccctgaagctaaaatcaaagcaccctcttttagtgtttctgctcctcaagtctccatacccgatgtgaatgttaatttgaaaggaccaaagataaaaggtgatgttcccagtgtgggactggaaggacctaacatagatctacaaggtccagaagggaaaatcaagttccctaagttttccttgcccaagatcagtgccccaggtgtgaaaatggaaggtgggagcactgagatcggcgctcagatgccctctcttgaaggagggttgagcacatcagatatgaagcttgaagggcctcatctgtctctaaaaggcccaggagtagacttgccttcggtggacctctctatgccaaaagtgtctgggcctgatcttgacatgaacttgaaaggaccaagtttgaagggagacctgggtgcctccagtcccagcatgaagctgcacgccccaggtcttgacctcaaaggtgttggtggaaaagtacatataggagcagatggtgtgaaaatgtcagggattgatgccacaacagcactcagtgttggggcaccagatgtaacactgaagggaccaagtctacagggagatctggctgtgtctggagacatcaaatgtcctaaagtgtctgtggctactcctgatgttagcttggaggcttcagaaggtgctgtcaaacttccccacatgaaactgcctcagtttggcatctccactccgggatccgacttggacattaacatcaaggggccacaagtttgtggagaactaaagggatcagggatggatgtgaatctgaaagggcctcagatctcagcaccaagcatggactttaacttggaaggaccaaaagtgaaggggagcctcggggctgcgggtgaattgaaaggcccagcgattgggggagctcttccaggcatcagcattcaaggcccagaaggaaacctccaaatgcctggaattaaggcttctgggtgtgatgtgaaactctcatcagggcagatttctggtcccgaaattaaaggagatctgaaaggttcaggactaggtctccatggagctgttcctgatatcggtgtcaaggggccttcctttaatgtggcatctcctgagtcagattttggtgtcagcttgaagggccccaaagtcaaaggaggtgtagatgtttcagggggtgtcagtgtcccagatatcaacctgggtgaagggcatatgagtgtcaaaggctctggagttgagtggaagggaccccaagtctcctcttctctaaacttggatacatctaaacttgctgggaaccttcatttctcaggaccaaagatagaaggagacgtgaaagggggccagaccggactccagggtcccgggctgagtgtgtctgggcctcaaggtcacttggaaagtgaatctggaaaagtaacattccccaagatgaagatccctaagtttaccttctctggccgcgagctcatcggtagagaagtaggagtggatgtcaacttccctaaagtggaggccaatgtgcaggctggtgctggagaaggcaagtgggaagagtctgaagtaaaactgaaaaaatccaaaatcaaaatgcccaagcatatcttttctaaatctaaaggaaaaggtggtgtcactggctcacctgaagcatccatttctgggtccaaaggggacctgaagagctcaaaggccagcttgggctccctggaaggagaagtggaagcggaagcatcttcacccaaaggcaaattctccctatttaaaagtaagaagccacgacaccgctccaactccttcagtgatgagagggagttctcagcgccttccaccccaactgggactttggagtttgcaggtggagacgctaaaggcaagcatggaaagctgaagtttggtacctttggtggcttgggatcaaagagcaaaggtcattatgaggttactgggagtgatgatgaggcaggcaagttacaggggagtggcgtgtccttggcctcgaagaagtcccgactgtcttcctcctctagcaacgacagtgggaccaaggttggtatccagcttcctgaggtagaactgtcagtttccacaaagaaagagtagtgggccttcatgcatgtacatatatatatatataaaacatcagccttgggtgtgtttgtatataaactccaaagagaaacaccccaatagcctaagcaataatgcaaagatcttgcccctgccagtggcaagtgccgacaaaccaagtgcctgtaggctcctgggactctgcagctaggtaaagagttctaagttcatctggcccacgtgcaaagtcaacagtattgccttaagatttcagtttttttttttttttttggtttctgttttcttttctttttcctttttctttctttctttttttttttgcattgaacgctgagagctcgtgtttactaagcaagcttttgtgtttatcttccttatttttactgaacatcttcagtacctgggtaatggaaacccactcttttttcattgtaatgactttgggggcttttgtgagtaagggagggtgggataaaaggtggcagagggagcaaggtcttaattgctctgaaggttggacccgtgaagccctggcatagacctgaagaggtggcagccagtgggtggttgtttctcaatctctgtagcatgactttttaatccccaggtgtgttagtcccagcctagtttggtgctcgaggtgagaggggatttgaatctgtttgcaaattgtccaacccaccaggtcaacgtgaggggcttacattctgggtttgataagaaaagtgttcattcatgactgctatgtcctgagaaaagttccgatttcttttaacaaatgtcatcatgattaaggaaatgtctggcactttaatggcaaattaattgagaatgtatgaaagtcatgaatgtacaagccaaataaagctctttattaaccctg

SEQ ID NO: 170 - DNA, 816 bp, Mus musculus
ggcacgagggtactctgacacttcagtctggagatctccggctcagatatgtcactgtccagtcgcctgtgtctcctcactattgtcgccctgattctgcccagcagagggcagacaccaaaaaagcccacatccatttttacagcggaccagacttctgcgactactcgtgacaatgtcccagatccagatcaaaccagcccaggagtccagaccacccctctcatctggaccagagaagaagccacaggaagccagacagcagcccaaaccgagacccagcaactgacaaaaatggccacctcgaatccagtgtcagatccagggccacatacaagcagcaagaaaggtacccctgcagtctccaggatcgagcctctcagcccatccaaaaacttcatgcctccatcctacattgaacatccactggattcgaatgagaacaaccccttctactacgatgatactaccctccggaaacggggactgctggtggctgcggtgctgttcatcacgggaattatcattctcactagtgggaagtgtaggcagttgtctcaattttgcctgaatcgccacaggtgagtgcgggccagcaccctgatgggcaccccagctggagcctccaaactacaccaactcaccaccccctgcctcctccctctaccccaagagcctacagagtgatcaacatgaaagaatcctgaaaggaagaggccactggagggagtcaggcttaaggctaatggtcttcccaccctggggagagaggtctccctaggcactgctgtggctgttcagataaatccacatggt

SEQ ID NO: 171 - DNA, 4467 bp, Mus musculus
gcatgcagaagccaaagaagtccctggaaatccagaccctgccaactgccctggacagagtagagggtgaagacaaacatcagagctcagacagcaaggacagggctcgggaggagaggacagaagaggtggagaaggcccaggggtctccagagcagccactgaaagaggaagtgctgccggacaaggagccgatcccagacaagccggagctgagcttgggtcacagcggggatttcaggccagatgaccccaagactgaggagaaggagcccggggagactcagcaaaacggcgacagagaggaagatgaggaaggcaagaaagaagacaaaaatgggaaattcaaattcatgttcaacattgcagatggcggtttcacagagctgcacactctgtggcagaacgaggagcgggcggctgtgtcctcggggaaaatctacgaaatctggcaccgccgtcacgactactggctgctggcaggcattgtgacgcatggctatgcccgctggcaggacattcagaatgacccgagatacatgatcctaaatgaacctttcaagtctgagatccacaagggcaactacttggagatgaagaacaagtttttggcccgtaggttcaagctgctggagcaggcgctggtgattgaggagcagctccggagggcagcgtacctcaacatgacccaggatcccaaccacccagccatggcgctcaatgctcgcctggcagaggtggagtgccttgccgagagccaccagcacctatccaaggagtccctcgccggaaacaagcctgccaatgctgtcctgcacaaggtcctaaaccagctggaggagctgctgagtgacatgaaagcagatgtgacacgcttgccctccatgttgtcacgcatccccccggtggccgcccgtctgcagatgtctgaacgcagcatcttgagtcgcctgaccaaccgagctggtgaccccaccatccagcagggcgctttcggctcctctcagatgtacaacaacagctttgggcccaacttccggggccctggaccgggagggattgtcaactacaaccagatgcccctggggccctatgtgactgacatctagccgtcgtcgtgacttccccctgtttcagcgctcctttccagctgagccaagccacctgcccaacccccgcgggagagaaaagctacagcccttttaggagttggtgcggtgttggggtacaaaagggaaaccatgaaattctatcacacggaggacaggcccaggctggctgcgcaagagtccagaagtgccacctcatcgtagttgaagccttcttccacacggcatcccatctacagctacgcctggcaaggtcctggcgccttttccagagtgactgacttagaggaaattccatttacctgtaaattttttttttggcactttcctactgaagatgcaaacatgtttgtcttgataaaaagttggatgacgtgtggaagattcagattcacgacactcctgtctgtcaccggctccagacctcaaggggaagctctttggaggcccttggtgctgctgctctatggattcaactgcggccgaagagaatgcagcatccagtgctctggaaacccttagtctgccccccgcccccgtctgtacccgtgtgactgctccagacccctgcctgcttgggaccctagtgctagcctagccagggaggggatcaggtctggagagtggctgcctaccctgctgatgcccagcatgggagacggcccggtacatcccacttctgggcaggagcgcatatctcaaggtctctggcatctctcatttccagtggacacgtggtggtgccagcaatgtgtggcaggttgaagtgagggtacctcgctcagagggtggagcagatttagaccttggacaaagccccctgcaggggtttttggacattttctgtctgcaggagtgtggtatagataggtgtgagctggtgtcccagagaagggtggtgtttgttgggtggccctgcgagacttgtcccactcaccttggcaaagacaagcatcttggagtgtcctgggccacacagatgccagcagcccctcccagagctgaattgatctctgttgtcttggtcctagagaagccttgactagggtgacttctgcatgaagtaggggccacaggggcctttgctggatctccgagggtatggagagagctgtgcttggagtggggcctggagctgatggtgactttagatccttcctacccggagccttcaaggcttctgacctcatttcctgcagggaagccttaagagtgccaggcccatcttcccatgtcactgttgacacgccacttgtcttgctctaccccagcctgtggcaccacgtaacgctccatgctggggtgggggtgggtggagcctgccaggctccaggcctgtgtctgaacttcttactggcccttggctcaacctggagagatcctggggttcagtttaccctgaagatgaggacggggcttgtggagagaagccagtcgggtccgagggagcttggtaggggtcagattgtccctggaaaaggagttggggggtatgcagcatctctgggcctgccaaaaatgggggcaggtctccatggcttgttttgaggacactgggcaggtggctggcctttacttagcccagatatgtacacatctgtaacatagttcctcctctgctcctggagggctggacccccacagcttcttatactttgccactcctatacttgagtgtctatccaagtcttaaggctagcaactggccgcacactgtgggtaggcggggagggggaggggactctggccatagacaggaccactgaaggcttgagtgcattatggtggctgaccccgctctccaagaagggctgtcctctgcacaggagtgtcttccctagttcgctccccaacccagacctctgtgctaatcccaagatgggcaagatggtcagccctgttggcctcagttgccacactgacatcctaagacttaggcctgcaggctcacgtgggacagaatagggtctgtgtctcttgacttcaggggtccatcccttccctgaagacttcccccaggagtcttgctctgtccatccatctctgcttcttcctgggccatacccaccctctgtggccttcccctctccacagccaccttgacctgagacccctgctggcctgggagggccttagcgcctcagttctccagggtagactgcccaggcagctgaggagaggacaaagtccttcagagtgttcgcatcttggcccttcagctgtcgcctgctagagagtgataggatagaggtggcatcttgaggtggctctcattttgctgctgatagaactgggtcctcatgcccgagctgtcagagctgcagtgacagtgatttctagctgctttggcttgcttaattctataggatctctgtggaaggtgtggggtggctctcggtgacataggggtttgggtcagagctacatcatctgagggcaccccctcacccctgttctgaattgcttactccccataccccaggggccacctgtgagccagggttccctcccccagcctctgggtgctccctagcccatgtgggctgctggctcagtgacaccggcaaccagtctaagtcttgagtcctgcagggggcacgtggagggtaggctagggggccagggctctttgtagtctcatagagtgggcaagtgttgatgcttggagtgtctcgtgtgtgccaaggaagggggttgggggcctaggctgaccctccctccaacttcgctgtcttggtctacccacaagggctcctgcgcagaccacagccaggaggaggaggaggccaacctgcccaatttatatacccgaaagtttacaggtcgtggcgcgtcagcccaaagtctttggtgtccctgcgtttatggatatttccctcttaattttcagattttttttttaaaaacaaaagtatttttttaggtatgataaacccggaaagggcctgttgggtatgtgtgtatgtcctgaactctccacaaagccacacggaccagagcccaggtcagaggcagctcttccacctggcctggaggggagggagggtcccctgctgcctaccagggtcaagctagactgcagggattctcttcctgcccaggccgggctggcatctgtcctacccttgcccaatcgagcacaccctgatgaagtcagagtaggtgcttggggtcagctgggagcacctcagcaggggtcccaagggcacatcaggagcccctctgaaggctgggcagaccagtggtatctccacttgtattctctgtgtgtatgttttggtttctgtgttttaataaaccctttgggaagggatggaaaaaaaaaaaaaaaaaaaaaaaaaaaaaaaaaaaaaaaaaa

SEQ ID NO: 172 - DNA, 3784 bp, Mus musculus
atgcgaatcctgcagagcttcctcgcgtgcgttcagctcctgtgcctgtgtcgcctggactgggcctatggatactacagacaacagaggaaacttgttgaagagattggctggtcctacacaggagcactaaatcaaaaaaattggggaaagaaatatccaatgtgtaatagcccaaagcagtctcctattaatattgacgaagatcttacacaagtcaatgtgaatcttaagaagctgaaatttcagggttgggaaaaagcgtccttggaaaacacgttcattcacagcactgggaaaacagtggaaataaatctcactaatgactactatctcagtggaggactttcagaaaaggtcttcaaggcaagcaagataactttccaccggggaaaatgcaatgtgtcatctgaaggatcggaacatagcttagaaggacagaagttcccactggagatgcaagtctactgctttgatgcggacagattttccagttttgaggaagcagttaaaggaaaaggaagattaagggctttatccattttatttgaggttggagttgaagaaaatttggattacaaagccattattgatggaactgagagtgttagtcgttttggaaagcaggctgctttagatccattcgtcttgcagaacctcctgcaaaactccactgacaagtattacatttacaatggatcattgacatcccctccctgcacagacaccgtggaatggattgtttttaaggatacagttagcatctctgaaagccagctggctgtattttgtgaagttctcacaatgcaacagtctgggtatgtcatgttgatggattacttacaaaacaatttccgagaacaacagtacaagttttccaggcaggtgttttcctcatatactggaaaggaagagatccacgaagtagtgtgtagttcagaaccagaaaatgtgcaagctgaccctgagaattacaccagccttctggtcacatgggaaagacctcgggtcgtttatgacgccatgattgagaagtttgcagttctgtaccagccactggcgggaaatgaccaagccaagcatgagttcttaacagatggctatcaggacttgggtgccattctcaataatttactacctaacatgagttacgttcttcaaatagtggccgtatgctctaatggtttatatggaaagtacagtgaccaactgatagtggacatgcccactgaagatgccgaacttgacctttttcctgaattaattgggactgaagaaataatcaaggaggaagaatatggaaaagacaatgaagaagacactggcttgaatcctggtagagacagtgtcacaaaccaaataaggaaaaaggaaccccaggtttctaccacgactcactataatcacatggggactaaatacaatgaagccaagactaaccgatctccaacaagaggatctgaattctctggaaagagtgatgttcccaacacttccccgaattctacttcccaacatgttgctgaattcgaaacagaaagaggaatttccttgccttctcagactggaactaacctgccaccacacaatgtggaaggcacttcagcctccttaaacagtggctctaaaactctctttatcttcccacagatgaacttgtctgggactgcagaatccttaaatacggttcccataacagagtacaaagaggtttctgctgacgtcagtgaggaagaaaacttcctgactgatttcaagctcgatacgggagccgatgactcttcagctggatagtaggtagggacagtgggaatctcgttcatccattcatgcgcgtcactaattagatgacgaggcatttggctaccttaagagagtcatagttactcccgccgtttacccgcgcttcattgaatttcttcactttgacattcagagcactgggcagaaatcacatcgcgtcaacacccgccgcgggccttcgcgatgctttgttttaattaaacagtcggattcccctggtccgcaccagttctaagtcggctgctaggcgccggccgaggcgaggcgccgcgcggaaaaccgcggcccggggggcggacccggcgggggaacaccgacgcggaggttccccccacacgcgcgggacgcccgcccgcccccgccacgcacctcgggagaggcgatgggggggtggagcgaggccccgcggggaggggacccgcgccggcacccgccgggctccccgggagcgcccgcgacgcccgccgcagctgaggcgatcccacgggaagggcccggctcgcgtccagagtcgcctgccgccgccggcccccccgagtgtccgggccccccgccccaccgggggcccgctggttcctcccgctccggaacccccgcggggttggacccgccgccccggagcccgcgccgcgcgccgacccccgacccgccccccgacgggaagaaggaggggggaagagaggtggcgacgacgcgggggacgacggggccctgcggggaagaggggagggcgggcccgggcggaaaggacggggggtctccccggacgtgggagagggcggcggcgcctcgtccagcgcgcgcgcgcccagacccagcccttagagccaatccttatcccgaagttacggatccggcttgccgacttcccttacctacattgttccaacatgccagaggctgttcaccttggagacctgctgcggatatggtacgcccggcgcgagatttacaccctctccccccggattttcaagggccagcgagagctcaccggacgcgcgaaccgcgacgctttccaaggcacgggcccctctctcggggcgaacccattccagggcgccctgcccttcacaaagaaaagagaactctccccggggctcccgccggcttctccgggatcggtcgcgttaccgcactgggacctcgcggcgcccatctccgccactccggattcggggatctgaacccgactccctttcgatcggccgagggcaacggaggccatcgcccgtccttcggaacggcactcgcccatctctcaggaactgacccatgttcaactgctgttcacatggaacccttctccacttcggccttcaaagttctcgtttgaatatttgctactaccaccaagatctgcacctgcggtggctccaccagggcctgcgcccctaggcttcaaggctcaccgcagcggccctcctactcgtcgcggcgtagcgtccgcggggcccgacgccgcgggggcgaaacccggtgtgcggaggggaggcgggggacgggcccccgctacgcacccccgaccccgagagacgcgcacccgcggccgctcccgtcccgttccgactgccggctgacttggaaccgggtatgggcccgacgctccagcgccatccattttcagggctagttgattcggcaggtgagtttgtacacactccttagcggattccgacttccatggccaccgtcctgctgtctatatcaaccaacaccttttctggggtctgatgagcgtcggcatcgggcgccttaacccggcgttcggttcatcccagcgccagttctgcttaccaaaagtggcccactaggcactcgcattccacgcccggctccacgccagcgagccgggcttcttacccatttaaagtttgagaataggttgagatcgtttcggccccaagacctctaatcattcgctttaccggataaaactgcgtacgtcggggaaaaaaagagcgagactcgtgccgaattc

SEQ ID NO: 173 - DNA, 1669 bp, Mus musculus
cgcttccccggtgctcaccacccgcgtcaccaggaggagcgcactggagccaagccgcagaccggactccagattccaaggaggccacgccatgaagattctcctgctgtgcgtggcactgctgctgatctgggacaatggcatggtcctgggagagcaggaggtctctgacaatgagctccaagaactgtccactcaagggagtaggtatattaataaggagattcagaacgccgtccagggagtgaagcacataaaaactctcatagaaaaaaccaacgcagagcgcaagtccttgctcaacagtttagaggaagccaagaagaagaaagaggatgctctggaggacactagggattctgaaatgaagctgaaggcattcccggaagtgtgtaacgagaccatgatggccctctgggaggagtgcaagccctgcctgaagcatacctgcatgaagttctatgcacgtgtctgcaggagcggctcagggctggtcggccagcagctagaggagtttctaaaccagagctcacccttctacttctggatgaacggcgaccgcatcgactccctgctggagagtgaccggcagcagagccaagtcctggatgccatgcaggacagctttgctcgggcatctggcatcatagacacgctctttcaggaccggttcttcgcccgtgagcttcatgacccccactacttctcccccatcggcttcccacacaagaggcctcatttcttatatcccaagtcccgcttggtccgcagcctcatgtctccctcccactatgggcctccgagcttccacaacatgttccagcctttctttgagatgatccaccaggctcaacaggccatggatgtccagctccacagcccagccttccagttcccagacgttgatttcttaagagaaggtgaagatgaccgcactgtgtgcaaggagatccgccgcaactccacaggatgcctgaagatgaagggccagtgtgaaaagtgccaggagatcttgtctgtggactgttcaaccaacaatcctgcccaggctaacctgcgccaggagctgaacgactcgctccaggtggccgagacggtgacagagcagtacaaggagctgctgcagtccttccagtcgaacatgctcaacacctcatccctgctggagcagctgaacgaccagttcaactgggtgtcccagctggctaacctcacacagggcgaagacaagtactaccttcgggtctccaccgtgaccacccattcctctgactcagaggtcccctcccgtgtcactgaggtggtggtgaagctgtttgactctgaccccatcacagtggtgttaccagaagaagtctctaaggataaccctaagtttatggacacagtggcggagaaggcgctacaggaataccgcaggaaaagccgtgcggaatgagatagaagcatcaccttcctatatgtaggagtgtctgggagggaatctcccagctccccgaggtggctgcagacccctagagaactccacatgtctccaggcgagtaggcctcacccaagcagcctgcccttcctctggattctgtacactaatgcctgcacttgctgctctcgggaagaactgattcccccacgcaactaatccaataaaagccgccttgcgatacgtgt

SEQ ID NO: 174 - DNA, 3406 bp, Mus musculus
gaacacagctcgccgggctccggcgggcagcgtggtgtccccagcctgcgacccccgggatccttctcctgcttcgccgcccgagcagcggcacagcgccgcatgtgtccccacccaagcctcagacccgcgggccgcacttaggggccgcggtcggtgcctggggaggaccccggcttcccgctccatccaaggctactcgagcgccgcgggggccctgcagaggcccgcgcagaagggaccatgaaagtgagatcagctggcagtgacagggatgtactgtgtgtcactgaagaggacctggctggtgaagacgaggacatgccatccttcccatgcacccaagagggccgggcaggaccccgctgcaaccgctgccagaagaacctatctttgcacacatcagtgcggattttgtacctcttcctcactctgctcctggtggccgtggctgtgctggcctctctggtttttagaaaggtggactctctctcagaagatatctccttggcccagtccatctataataagaagcttgtgtcaatgcaagaaaatcttcaaggactagacccaaaagccctgatcaattgttccttttgccgtgaggctgagcagctggggcaagagatcaggaaggtccaggaggagctggaggggcttcagaagatgctgctagcccaggaggtccagctggaccagacctcccagacccatgagctgctctccaccagaagcagtcaaatctcccaggagatgggcagttgctccttctccattcaccaggtcaatcagtccctgggactcttcctggcacaggtgaggggctggcaggccaccacagcaggcatggacatcaccctgaaggacctcacccaggagtgctatgatgtcaaggctgctgtacaccagatcaacttcacggtgggccagactgctgagtggatccacgggatccaaaggaagacagatgaggagaccctgaccctgcagaagatagtcactgactggcagaactacaccagactctttgggggtctgcgaaccacctctgccaagactggcgaaatagtcaagaccattcagaccaccctgggggcctcctcacagcgcattagccagaattctgagagcatgcatgacttggttctgcaggtcatgggcctacagctacagctggacaacatctcttcctttttggatgaccatgaggagaacatgcatgacctccaataccacacccgatatgcccagaatcgcacagtggaaaggttcgagtctctggaaggacgtatggcttctcatgagattgaaatcggcactatcttcaccaatatcaatgccaccgacaaccacgtgcacagcatgctcaagtacctggacgacgtgcggctgtcttgcacactgggcttccacacccatgctgaagagctctactacctgaataaatccgtctccctcatgctgggcaccacagatctgctcagggagcgcttcagtctgctcagtgcccggttagacttcaatgtccgaaacctctccatgatcatggaggaaatgaaggctgtggacacacaccacggagaaatccttcgcaatgtcaccgtcatccgaggtgtccccggccctccaggaccaagaggactcaaaggagatacaggcgtgaaaggacctgttggtagcagaggacctaaaggggatcctggcaatctgggacccccaggacctcagggtcctcaggggcagcctggggagccaggacctgtgggagaaagagggccagctggccccagaggctttccaggcctcaaaggctcaaagggcagctttggcactggaggaccaagggggcagccaggccccaagggggatgtggggcccctagggccagaggggcccccagggtctccaggaccttcagggcctcagggaaagccaggaatttcaggaaagacagggtcaccaggccagcgaggggccacagggcctaagggtgaaccaggcatccagggtccccctggactacctggacctccaggtccaccagggaaccagagcccctactgaaaaaagtctttggcctgatgctgccatgcaggttggagaggtgagggtcagagaaagcagccagaagggttgctacaatcattgttctttgatcctaatacgagggtgtctcttagagctgactgcatagccttaagcttcccaataatgactgtaccataggaaaacagctcacctccccctacttttttctgctgactaaaggggagtctattgggtttctatggctggttagaaggaaaggctgtgagagcctgctggtgggggaagggatagctacctggggaagaatgtcttagatctcttggatggtaactactctggtctctgcaatgacttaacacccatgcgagccaagtcttgaagaaaaaaaaaatccagggaaacttttggggcattataaatgaaactccagggatagcagcctcccctctttccccctccctcgacacataacagtcacggtagaatcatgtggagctgccttgatccacacagggcaagagaagtctgcctggctggcattcccaggccttatgcatggatactgaccctgacaagttcagagagtttttattcacatgtccagaaaattcctcttttcagtcttacctctgcatctcaagagtggcctggaagaaacccaagcagagtttcatcggcaggtcaagaacctacaggtcccagagcactctgcttgacttctatccagctcccaggaagaccacagggctggaggtgggaggacatatcaggggaaaactcccctctccaaagccaccacttgttcaacctactctgccttgtcttactcccagtaatagccaaggaggaagaagctggtaacacggcagctcttgcctcctcctcttggttgacctgagacagatgcacaatgacctcaccccacaatgacctaagatggctggagttctttcccacatgaacagcaagctggaccaggcatgcgaaaggctgaacgtgcgcaaggaaccttagatgttacttctcgtctttcatgaacttcttgaatacactggcaaaaagggatgctgggaaaggcctgcatttccttgactcattttgtagagctgccctgatccttcatactccagcagactcaaacactcctgggcagaggctagagctgtgtcctctcttgccctgcctcagagacctgtcttcttcttcctgttcaaaggctctgtgctaccttcttcatcaatatcagtgtgcaactggcttgcacgacccatctacccctgctgtataattgtcctgtctacatatgaaaatatcatgcaacacaatatcgctgacccagtaaagagctgtttccagt

SEQ ID NO: 175 - DNA, 1382 bp, Mus musculus
gatccagagttccaagtccagaaaggcaagcattttgacattctcaaaaacaggatttgtatctacggggaacttggagttttctcagctatcactggtgaaaaaacttgttctgacagctactttcttgggataatcttggacttgaggtacaggaacttccttagaactgggggttggcagtcacttgctcctccatcctcatttaacaccaactcaccattgcccctgaccttgccatctggctaaggtccccagaactcaaatggctccaggaacaacaggcactgcccgaaccaatctcattcctgggaaggtattcagggtgacttagggcctactgtacagtgggtacaacgaggccctcccattccacagccaggatggtgcaagcagagagtccacctctgtcagcaagggcagggcttagtcagcatctgggtggcaacaggacaggggaggagctgtggggagaactcaggtatttaaaatctcctgaggagcctctacagctccaacctcactccctgaagctcctggacaccctgttaccatgtggttcctgatcctgttcctagccctgtccctaggagggattgacgctgcacctcctgtccagtctcgaatagttggaggatttaaatgtgagaagaattcccaaccctggcaggtggctgtgtactaccacaaggaacacatttgcgggggagtcctgttggaccgcaactgggttctcacagctgcccactgctatgtcgatgagtgtgaggtttggctgggcaaaaaccagttattccaagaggaaccctctgctcaaaaccgattggtcagcaaaagcttccctcaccctggcttcaacatgaccctcctgacctttgaaaagttacctcctggggctgacttcagcaatgacctgatgctgctccgcctcagcaagcctgctgacatcacagatgttgtgaagcccatcgacctgcccacaaaggagcccaagctggatagcacatgtctagtgtcaggctggggcagcattacacccacaaaatggcaaaagccagatgatcttcagtgtatgttcaccaagctcctgcccaatgagaactgtgccaaagcctacctactgaaagtcacagatgtcatgctgtgtacaatagagatgggtgaagacaaaggcccttgtgtgggtgactcaggaggcccactgatttgtgatggtgttctccaaggaaccgtatcaattggccctgacccatgcggtatacctggtgtatcagccatctacaccaaccttgttaagttcaactcctggataaaagatactatgatgaaaaatgcttgagtgtcacattgttccatgttttcaataaaacccaacatgaagc

SEQ ID NO: 176 - DNA, 1446 bp, Mus musculus
gcccggcctgaggccccagtcactgagcgcctgccggggagctgggtgccacctcgctgtcgaagtctctgcaccctgcctgctctgcttgctccccttgctcgcttgcttccccttgtccagggggaaaggtcaactgcgtcctggagcctccgtgccactctccaacagctatgaactgcagcgagagccaacggctgcaaaccctcttgaaccgcttgctgctggagctgcaccatcgtggcaacgccagcggcctgggcatcggaaccggcccgagcatgggcatgggggtcgtccctgaccctttcgtgggccgcgaggcgaccagcgccaagggtaacgacgcttatctctacatcctactcatcatgatcttctatgcctgcctagccggaggcctcatcctggcctacacccgctcccgcaagctcgtcgaggccaaggatgagccacccctggcctgtgttgctgagcaggaatgggtccccgctgccatcgcatctgccgacccggagaatggccagggcttgctggctgagggcggccaccagctcgcagcaggggcgctgcctgcgctggctcagggcgctgagagggtctagatccgctgtcctcctcattttgcttatccctgggcctggctcccgcgcttttactgccgttccagagctcgctttacccgaggcccagaagatgatgagaggtcagaacccttcaaggcaaggccctggaagaagaagcagcgccttactcacacccgaccaccttctctctcccctcccttccatgccggcaggcacccctaccccgcatatccaaccgaattaaactgcctctgctttcttgtcttcagccagccccaacaccatgctctagccttctgggaacagaatccagcacgtccaacacttggcattgaatcgaagcaacgaagtctagcagaactctggggccgtttaactggcagctgctccaggggctgccaaggactgctcagtctgcacagctaatggggttagccatcactgccaggcccgctgcagcagctcaagctttctgttgccttggggacagagacaaagagcacgaagagacctcagacatcttttccttcagcgggctattagggagacactattgtggcatagaatggactgaaggggagggaaggttcaatgggaaaggaagatctatggtcccaggggtatggtgttcttgttttcctgtccccctaattgccatcccaatggtctgagtattagtgctttggacatctggcttggataatcattactagttgcttagccttaataatcccaaatgcatctcttatattggttcagttattactgcaatgtatgtatgcttcattcagggccagtcatccctagctctgtaaccttggggaatcttacaggcaggtaataaagtttgttaatcagt

SEQ ID NO: 177 - DNA, 2145 bp, Mus musculus
gagatgcctcccagggagcccggaccccgacgcaggcagaccatgtgggtcctgatgagctggctggccttcgcggcagggctggtagccggaacacagtgtccagatgggcagttctgccctgttgcctgctgccttgaccagggaggagccaactacagctgctgtaaccctcttctggacacatggcctagaataacgagccatcatctagatggctcctgccagacccatggccactgtcctgctggctattcttgtcttctcactgtgtctgggacttccagctgctgcccgttctctaagggtgtgtcttgtggtgatggctaccactgctgcccccagggcttccactgtagtgcagatgggaaatcctgcttccagatgtcagataaccccttgggtgctgtccagtgtcctgggagccagtttgaatgtcctgactctgccacctgctgcattatggttgatggttcgtggggatgttgtcccatgccccaggcctcttgctgtgaagacagagtgcattgctgtccccatggggcctcctgtgacctggttcacacacgatgcgtttcacccacgggcacccacaccctactaaagaagttccctgcacaaaagaccaacagggcagtgtctttgcctttttctgtcgtgtgccctgatgctaagacccagtgtcccgatgattctacctgctgtgagctacccactgggaagtatggctgctgtccaatgcccaatgccatctgctgttccgaccacctgcactgctgcccccaggacactgtatgtgacctgatccagagtaagtgcctatccaagaactacaccacggatctcctgaccaagctgcctggatacccagtgaaggaggtgaagtgcgacatggaggtgagctgccctgaaggatatacctgctgccgcctcaacactggggcctggggctgctgtccatttgccaaggccgtgtgttgtgaggatcacattcattgctgcccggcagggtttcagtgtcacacagagaaaggaacctgcgaaatgggtatcctccaagtaccctggatgaagaaggtcatagcccccctccgcctgccagacccacagatcttgaagagtgatacaccttgtgatgacttcactaggtgtcctacaaacaatacctgctgcaaactcaattctggggactggggctgctgtcccatcccagaggctgtctgctgctcagacaaccagcattgctgccctcagggcttcacatgtctggctcaggggtactgtcagaagggagacacaatggtggctggcctggagaagatacctgcccgccagacaaccccgctccaaattggagatatcggttgtgaccagcataccagctgcccagtagggcaaacctgctgcccaagcctcaagggaagttgggcctgctgccagctgccccatgctgtgtgctgtgaggaccggcagcactgttgcccggccgggtacacctgcaatgtgaaggcgaggacctgtgagaaggatgtcgattttatccagcctcccgtgctcctgaccctcggccctaaggttgggaatgtggagtgtggagaagggcatttctgccatgataaccagacctgttgtaaagacagtgcaggagtctgggcctgctgtccctacctaaagggtgtctgctgtagagatggacgtcactgttgccccggtggcttccactgttcagccaggggaaccaagtgtttgcgaaagaagattcctcgctgggacatgtttttgagggatccggtcccaagaccgctactgtaaggaagggctacagacttaaggaactccacagtcctgggaaccctgttccgagggtacccactactcaggcctccctagcgcctcctcccctaacgtctccccggcctactcatcctgagtcaccctatcaccatgggaggtggagcctcaaactaaaaccttcttttatggaaagaaggctgtggccaaaagccccgtatcaaactgccatttcttccggtttctgtggaccttgtggccaggtgctcttcccgagccacaggtgttctgtgagcttgcttgtgtgtgtgtgcgcgtgtgcgtgtgttgctccaataaagtttgtacactttc

SEQ ID NO: 178 - DNA, 1841 bp, Mus musculus
cttggaccaactgtgccctgctgtcctcacttttattcccaaagcaggagcccatctgacacctcttccctgctttcagctgcagaatatccaaacctgtaggagccagaagacagactggcctttccaagaacgtgctatttcaaggatccctgggcccacctgggccccctggaagagacggcagtaaaggcatgagaggagagccaggagagctaggagagccagggctgcctggagaagtgggcatgagggggccccagggacctcctggactaccagggcctgctgggccagttggagctccaggtcttcgaggagaacgaggtgaaagggggcctccaggggaaaagggggagcgaggcctggatggattccctgggaagcctggagagactggagagcagggaagacctgggcctcctggtgtggcaggactgcagggagagaagggagatgtggggcctgcaggaccccctggtgtgccaggctctgtggtgcagagggaaggcctgaagggagagcagggagcccccggaccaagaggtcaccaaggcctacctgggcctccaggagcacctggtttgattggcccagaaggcagagatggacccccggggcctccaggtctccgagggaagaaaggagaaatgggtcccccaggaacccctggagcactggggccacagggcccgcctggaccacccggtgttccagggccccctggacctggaggacccccgggtttacctggcgagctcggcttcccgggaaaacctgggcctgctgggcatgcggggacacctggaaaggatgggctgaatggaccaccaggccttcctggctccaagggagaaccaggagactctggcgaaagtggcgtacctggaatgccaggacctcggggtgaagttggggagcggggccttgcaggtcatcctggtgagaagggagaagttggccttccgggtgctccaggcttcccaggagtacatggagagaaaggagaccagggagaaaaaggtgaactgggacttccaggtctgaaaggtgcccgaggagaaaagggtgaggttggtccagcaggtccccctggcttacctggaagtccatcagtgttcacaccacacccaagaatgccaggagagcaagggcctaaaggagagaaaggtgatcctggcgagcctggagccctgggaccacagggccatcctggagaattgggtcctcggggacccattggacctccgggtgccaaggggcatgatggtgcacaaggacctcctggagcagctggaaaccctggtgctccaggacctgcaggaccccctggtctcagtggaccccctggaagtttgggttctcctggtgtcaggggtgcccctgggaaagatggggagcgtggagagaagggaacagcaggggaagaaggcagcccagggccagctggtccacggggagatcctggtgctcctggtctcccagggccaccaggaaagggcaaggatggggagccgggactacgtggaccacctgggttacctggtcccttaggaatcaagggtgaccgaggaacacctgggattcctggctctcctggcagccgtggtgacccaggcattggggttgctggtccacctggtccctcaggacgaccaggagataaaggacccccgggatctcgaggcttacctggattccccggcccccagggaccagctggccaggatggtgcaccaggaaacccaggagaaagagggcctcctggaaaaccagtatgtcacctgccgggtctggatgaatgctgactgtcagacagggtgccagcgaaaaataaagta

SEQ ID NO: 179 - DNA, 2776 bp, Mus musculus
gaactggataggaatgtttgcttggctcgcctgagaagagaaaagattcctcgacctcctcttgcttcttctttagaataatttggatgggatttgtgatgcagaaaagcttaaagaaaaaaggataaccgttctttgtggtggaaagtttaggggggaaaaaacccactgctttcttcaaacaagggtgccattctgatatttatgggaattgttgttcccactatgaaggcatctgttattgaagtgttgcttgttttgctggtaactggaatacattcaaataaagaaacgccaaagaagactaaaaggcccaaactcactgtgcctcagatcaactgcgatgtcaaagctggaaagatcatcaatcctgagttcatggtgaaatgtccagcgggctgccaggaccccaaataccatgtttacggcactggcgtctacgcgtcttactccagcgtgtgtggcgccgcaattcacagcggtgtgctggataattcaggagggaaaatacttgttcggaaagttgctgggcagtctggttacaaaggaagctactcgaatggggttcagtctttatctttacccagatggcgagagtccttcatcgtcgcagaaagtaagccccaaaagggtgtagcctacccatcgactcttacatattcatcatcgaaaactgcagctgctaaagcaggtgagaccacaaaagcctatgagaagccatctattccagggacaaccatacagcctgtcaccctgacacaggctcaagctacccctgtagctgaggtcacccacagatccacctcaaagccatttgcagcatctgtcaccaacagccccagaccccaacctgtgggccacaggagtcaggagatggaagaggtggacgggtggaagcctggaccagtccttttagattcaggatttgtgccaaaagaagaactcagcacacagtcttcggagccagtgccgcagggagatccaaactgcaaaattgacttgtccttcttaattgatgggagcaccagcatcggcaagcgccgcttccggatccagaagcagttcctagcggacgtcgtccaggctcttgacatcggccctgccggtcccctcgtgggtgttgttcagtacggagacaatcctgctacccagtttaacctcaaaactcacatgaattctcaagatctgaagacagctatagagaaaattacccagagaggaggcctttctaatgtaggccgtgccatctcctttgtaaccaagaccttcttttccaaagccaatgggaacagaggtggtgctcccaatgtggctgtggtcatggtggatggctggcccacagacaaggtggaagaggtgtcacgagttgccagagagtctgggatcaacgtcttcttcatcaccgtcgaaggggccgccgaaagggacatacagcatgtggtggagcccggttttgccagcaaggcagtgtgcagaacaaacgggttctactccttcaatgtgcagagctggctcagccttcacaaaacagtgcagcccctggtgaagcgggtctgcgacacggaccgcctagcctgcagcaagacctgtttaaactctgcggacataggctttgtcatcgatgggtctagcagcatggggacaagcaacttccgcacggtcctgcagttcgtggccaacctcagcaaggagtttgagatttcagacaccgacacacgcgtcggggccgtgcagtacacctacgagcagcggctcgaatttgggttcgacaagtataacagcaaagccgacatcctcagtgccatcaggagggtggggtactggagcggaggcaccagcacaggggctgccatccagtatgccctcgaacagctcttcaagaagtccaaaccgaacaagaggaaggtaatgatcattatcactgacggcaggtcttacgatgacgtgcggatcccagccatggctgcctaccagaagggggtgatcacgtatgcaataggcattgcgtgggctgctcaggacgagctggaggtaatggccactcaccccgccaaggaccattccttctttgtggatgattttgacaacctctacaaaattgcccccaggatcatccagaatatttgtacagagttcaactcacagcctcgaaactgagctgggaccagacagaggatggcaaacactgtcttacggatccttgggaccatccctcgccttgtgcctatgggtgggggtggagtggggggtagggggagtttctgacagagcttgggaaaaggcgtttggtgttactattctttgccattggtggtgtgcatgcttcaaaacctaccaggtaaaaggctggctaggagctctcaggttgggttcaaatactgcatcgctttgtgtgcactgaagaatccacattttgacagttgttttcaaaatagttaatccagaggagagtccagctcttaggacaggaaagacctgagaggttataggaagtttgtttacatttcccattagaactctgtaattgtccataagtatctttttattgttttcttccccttttttactttctttttcttcttttttgtcatgagaatgtgggagttgctgaaataaatgtttcaaagaatcaaaaaaaaaaaaaaaaaaaaaaaaaaaaaaaaaaaaaaaaaaaaaaaaaaaaaaaaaaaaaaaaaaaaaaaaaaaaaaaaaaaaaaaaaaaaaaaaaaaaaaaaaaaaaaaaaaaaaaaaaaaaaaaaaaaaaaaaaaaaaaaaa

SEQ ID NO: 180 - DNA, 5157 bp, Mus musculus
gaggcgtgtgagtgtgcgcgcacgctgcgctgcactcagtctagagaactcaggacgtggaaaagctggggtcagcgcagactggcagggagagatcgaggatcctcctgtgggccgtggacccctggccctgcttcccatagctggcagccttagggctgccaggattgctcagtaaagggctccgcgggccgttggtgccgaggctgcagctgatctctctggaccagcatgttgacatcctgggctcccggcctgtgggtgctcgggctctgggccaccttcagccatgggacaaatataggtgagcggtgcccaacttcacagcaagaaggactcaagctagaacacagtagtgacccatcaaccaacgtgactggcttcaacctaatccgccgactgaacctcatgaagacatctgccatcaagaagatccgcaaccccaaggggccactcatcttgaggctgggggctgccccagtgacccaaccaactcgacgagtgttccctcgaggcctcccagaggagtttgccctggtcctgacagtgcttctgaagaaacacaccttccggaacacatggtacttgttccaagtgactgatgcaaatgggtacccacagatctccttggaagtcaacagccaggagcggagtctagagctccgggcacagggccaagatggtgactttgtgtcctgcatcttcccagtgccccagctcttcgatctgcgttggcacaagctgatgctgagcgtggcaggccgtgtggcctctgtgcatgtggactgtgtctcagcttcctcccagcctctgggaccccggcaatccatccggcctgggggacatgtatttctgggcttggacgctgagcagggcaagccggtttcatttgaccttcagcaggcgcacatctactgcgacccggagctggtgctggaggaaggctgctgtgagatcttaccgggagggtgtcccccagagacctccaagtcacgccgggacacccagagcaatgagctcattgagatcaatcctcagacagagggcaaggtctacacccggtgcttctgcttggaggaacctcagaacagcaaggtggacgcgcagctcatgggaagaaacatccagaaagcagaaagggggacaaaggtccaccaggggactggagttaatgagtgcccaccctgtgcccacagtgcccgggagagcaatgtcacacttggtccctctggcctcaagggagggaaaggcgaacgaggcctgactggaccatcaggccccaagggagagaagggagcacggggcaatgactgtgttcgagtgtcccctgatgccccacttcagtgtgtagaaggcccgaaaggagagaagggagaatcaggggacttgggacccccaggactcccaggaccaacaggccagaagggccagaaaggggagaagggtgatggaggcctcaaaggacttccaggaaagccaggacgagatggtcggccaggagagatctgtgtcattggacccaaagggcagaaaggagacccaggctttgttgggcctgagggactggcaggagagcctgggccacctggcctccctggaccacctgggataggactgcctgggactcctggagatccaggtggcccaccaggccctaagggagaaaagggcagctctggaataccaggaaaggaaggcccaggagggaagccggggaaaccaggagtgccagggactaagggagagaagggtgacccctgtgaagtgtgcccaacgctgcctgaagggtcccagaattttgtggggctccctggaaaaccagggcctaaaggggaaccaggtgatcctgctccagcctgggagggcctaggaactgtgggactgaaaggtgaccggggagatccaggcatccaaggaatgaaaggagagaagggggagccctgctcatcctgtagttcaggggtcggagcccagcatcttgggccctctcctggccatggtttacctggccttccgggcacatctggaattcctgggccaagaggcctgaaaggggagaagggtagttttggcgatacaggaccggctggagttccgggatcaccaggaccagtgggaccagctggcatcaaaggggcaaagggggagccctgtgagccctgcacagccttgtctgagctacaagatggggacatgcgtgtggttcatctgcccggcccagctggagagaagggagagcctgggtccccgggcttcgggctgcctgggaagcagggtaaagcaggagagcgtggactcaaggggcagaagggggatgctgggaatccaggagaccctggaacaccaggcatcacagggcagcctgggatatctggagagcctgggattcgaggtcctgcaggaccaagaggagaaaagggtgatggatgcactgcctgccctagcctgcagggggcgttgaccgatgtatcgggactgcctgggaaacctggccccaaaggagagccaggtccagaaggtgtgggccatcccggtaaaccaggccagcctggtctaccaggagttcaagggcccccaggaccgaagggcactcagggagagcctggacctccaggcacgggtgctgagggaccccagggggagcctggaacccagggtttgcctggcactcagggccttcccggacctcggggaccacctggctcagctggggaaaagggtgcccagggatctccggggcccaaaggagccataggacccatgggacctcctggtgctggtgtctcggggcctccgggccaaaagggatcacgaggcgagaaaggtgaaccgggagagtgttcctgcccttctcggggagagcccatcttctcgggcatgccgggtgctccgggactatggatgggcagctcctcgcagccgggcccgcagggtcccccaggtgtccccggaccaccaggtccccccggaatgcctggattgcagggagtgcctggacacaatggtttgccaggacagcccgggctcactgccgagctgggatccttacccatcgagaaacacctcctcaagagcatctgtggtgactgtgcccagggccagacggctcatccagccttccttctggagaaaggagaaaagggggaccagggcatccctggcgtgccaggttttgacaactgtgccaggtgcttcatagagagggaacgcccaagagctgaggaggccaggggagacaacagtgagggagaacctggctgttctgggagccctggcctgcctggtcctccagggatgccaggccaaagaggagaagagggtccacctggcatgaggggctctcccggtcctccaggccctattgggcttcaaggggagcgaggcctcacgggcctgactggagacaaaggagaaccgggtcctccaggacaacctggctacccaggtgccatgggccccccaggactgcctggtatcaagggagagcgaggatacactggcccctcgggagagaagggcgaatcgggcccaccaggatctgaaggccttccaggtccccaaggtccagcgggtccccgaggagagcaaggcccccaggggagctctggagagaagggtgaccagggatttcaaggccagccaggcttcccaggcccaccgggtcctccaggattcccaggcaaagctggagctcctggcccacctggcccccaagcagagaagggcagtgaagggattcgaggtccctcaggcttgcctgggtcccctgggccacccggccctcccgggattcagggccctgctgggctggacggactggacgggaaggacggcaagcctggcctgaggggggacccaggtcctgctggccctcccggactcatgggacctccaggcttcaaggggaaaacaggtcatcctggcctccctgggcctaagggtgactgtggaaaacccggtcctcctggcagcagtggccggccaggggcagagggtgagcccggtgccatgggaccccagggacgaccaggacccccagggcatcttggtcctccaggccagccaggtccacctgggctctccactgtgggcctgaaaggagatcggggagtccctggagaaaggggcttggcgggcctcccaggccagcctggcacacccggacaccctggccctccaggtgagcctggttcggacggtgcagctggcaaagagggacctcctggaaagcagggactctatggaccccctggcccaaagggtgaccctggacctgcaggacagaagggccaagcaggagaaaagggaagatctggcatgccagggggtcctggcaagagcggctccatgggacctatcggaccaccggggcctgcaggagagagaggtcaccctgggtccccagggcctgcagggaaccctggattgcctggtttgccgggctctatgggagacatggtgaattatgatgatatcaagaggtttatcagacaagagatcattaaactgtttgatgagaggatggcttactatacctccaggatgcagttccccatggaggtggcagcagctccaggccggccagggcctccggggaaggatggtgctccaggtcggccaggtgctccagggtcacccgggctccctggtcagataggccgagaaggacgccagggtttgccaggaatgagaggactgcctggtaccaaaggtgaaaagggagacattggtgttggcattgcaggagaaaatggtctccctggccctccaggtcctcaagggcctccaggttatggcaagatgggtgcaactggaccaatgggccagcaaggtattcctgggatccctgggcccccgggtcccatgggccagccagggaaggcaggccactgcaacccctcagactgctttggggccatgccaatggagcagcagtacccacccatgaagagcatgaaggggcctttcggttgaaactcccgcccacactgagatgaaggactctactaggaataaatggccaaagcttacaggactctgatgggttgtgaatgtttgtgctattcctgtgtttgttgttgttgttgctgttaatatttttttaacaataaagaaaactatttgtaaccccacttccatggggttcccctggtgctg

SEQ ID NO: 181 - DNA, 1221 bp, Mus musculus
cgccccgacaaggggcgtgtggcccgggccgctggctagtgagcggtccgcccgtaggggagggcagaaagttcgggtccccgcaccgactgacttgagatccggcacagtgagcagcgggaggcggcggcggccggcagaggcgcggccagggcatggacagcgcggccgccgccttcgccctagacccgccagcgcccggcccggggcccccgcccgcacccggcgattgcgcccaggcgcgcaagaacttctcggtgagccacctcctggacctggaggaggtggcggctgctgggcgcagggctgcggggcccgtttcggggcccgccgaggcgcgggtgggagcggcgcgcgaaccgtccgggggcagcagcggcaccgaggcggcgccgcaggacggtgactgtcccagccccggccgtggcaccaaacgaaagaagaagcagcgccggaatcgaaccacattcaacagcagccagctgcaggcgctggagcgtgtatttgagcgcacacactaccctgacgcctttgtgcgtgaagagctagctcgccgtgtcaacctcagtgaggcacgtgtccaagtctggttccagaaccgccgtgccaagtttcgccggaatgaacgtgccatgctggctacccgctctgcctcgttgctcaagtcttatggccaggaggcggccattgaacagcctgtggccccccgacctaccacgatgagcccagattatctatcctggccagcatcctccccctacagctccgtgcctccctatagccccggaggttcaagtcctgcaactcctggagtcaacatggccaacagcatcgccagccttcgcctcaaggccaaagagttcagcctacaccacagccaggtgcccacagtgaactgactgtgcattgggtccagcttcctccctggcccaatggcagactgcagcaaaggcagtagccttgtctgtctctgtcctcagacaaactgggcagcctctcccgtgccttttctccatcacagcttcctgagttccagaggcctgttgggtgctggaagcagttgaacaagtcactgctatggtggctgagattgtgcctaaggcccctggagtggcctggccagaaggcggagctggagtccgccaaggaactcacttacttatgtattaaaaccaaaaagcttttgtctttaaggaataaaaccatttttcgtaagctcaa

SEQ ID NO: 182 - DNA, 887 bp, Mus musculus
agctccaagctcacagcctgcagctcctggacagctgtcaccatgtggttcctgatcctgttcctagccctgtccctaggagggattgatgctgcacctccagtccaatcacgaatttttggaggatttaactgtgagaagaactcccaaccctggcaagtggctgtgtaccgcttcaccaaatatcaatgcgggggagtcctgctgaacgccaactgggttctcactgctgcccactgccataatgacaagtaccaggtttggctgggcaaaaacaacttttttgaggatgaaccctctgcccaacaccggcttgtcagcaaagccatccctcaccctgacttcaacatgagcctcctgaatgagcacaccccacaacctgaggacgactacagcaatgacctgatgctgctccgcctcaaaaagcctgctgacatcacagatgttgtgaagcccatcgacctgcccactgaggagcccaagctggggagcacatgcctagcctcaggctggggcagcattacacccgtcatatacgaacccgcagatgatctccagtgtgtgaacttcaagctcctgcctaatgaggactgtgtcaaagcccacatagagaaggtgacagatgttatgttgtgtgcaggagatatggatggaggcaaagacacttgtatgggtgactcaggaggcccactgatctgtgatggtgttctccacggtatcacatcatggggccctagcccttgcggtaaacccaatgtgccaggtatctacaccaaacttattaagtttaactcttggataaaagacactatagctaaaaatgcctgaatatcacattgtcccatgttctcaataaagcccaccatgcagcaaatcgagttcaagtt

SEQ ID NO: 183 - DNA, 1041 bp, Mus musculus
attatgataattcagcctgaatgtcttttagagggtgggcttttgttgatgagggaggggaaacctttttttttctgtagacctttttcagataacaccatctgagtcataaccagcctggcagtgtgatgacgtagatgcagagggagcagctccttggtgaatgagtgataagtaaaggcagaaaaaataatgtcatgtctccatggggaatgagcatgagccagagattgttcctactgatgaaaagctgcatatgcaaaaatttaagcaaatgaaagcaaccagtataaagttatggcaatacctttaaaagttatggcttatctaccaagctttatccacaaaagtaaagaattgatgaaaaacagtgaagatcaaatgttcatctcaaaactgcttttacaaaagcagaatagaaatgaagtgaaaatgctgcattaagcctggagtaaaaagaagctgagcttgttgagatgagtgggatcaagcggctgcgaggcggtgcagtgtgccaatgtttcgtttgcctcagacaggtttctcttcataagcagaagagttgcttcattccatctcggagcaggaaacagcagactgctgttgacagataagtgtaacttggatctgcagtattgcatgttagggatagataagtgccttttttctctttttccaaaaagacctgtagagctgttgaatgtttgcagctggcccctcttaggcagttcagaattttgagtagttttcccatccagcctcttaaaaattcctaagccttgcaccgatgggctttcatgatgggatagctaataggcttttgcatcgtaaacttcaacacaaaagcctacatgattaatgcctactttaattacattgcttacaagattaaggaatctttatcttgaagaccccatgaaagggatcattatgtgctgaaaattagatgttcatattgctaaaatttaaatgtgctccaatgtacttgtgcttaaaatcattaaattatacaaattaataaaatacttcactagagaatgt

SEQ ID NO: 184 - DNA, 3635 bp, Mus musculus
ccggcctgcactggccgccagccaccgagaggaggagcagaggatcctcggagcgcaataaaacggcggctcggcccgagcccgcagcaaacacagccatagaaggcagcggaggagccgagccgggctgcgctcgctcgccgccccccagcctctttcttctccgccgggtgcactgccctgcgccgtcccctcgccgctgcgccccttgacaaagaggacagaaagtttgcgcgggggagcgggccaggtgaggaggggcgtgcccggcgccccagtccgcgccccagcagccggacccaggcccccagcgcgcccgccatgggcgccgcggcccgcagcctccggctggcgctcggcctcctgctgctagccacgctgctgcgcccggccgacgcctgcagctgctccccggtgcacccgcaacaggcgttttgcaatgcagacgtagtgatcagagccaaagcagtgagcgagaaggaggtggattccgggaatgacatctatggcaaccccatcaagaggattcagtatgagatcaagcagataaagatgttcaaaggacctgacaaagacatcgagtttatctacacggccccctcttcagcagtgtgcggggtctcgctggacgttggaggaaagaaggagtatctaattgcaggaaaggcagaaggagatggcaagatgcacattaccctctgtgacttcattgtgccctgggacacgcttagcatcacccagaagaagagcctgaaccacaggtaccagatgggctgtgagtgcaagatcactcgctgtcccatgatcccttgctacatctcctccccggatgagtgcctctggatggactgggtcacagagaagagcatcaatgggcaccaggccaagttcttcgcctgcatcaagagaagtgatggttcttgcgcgtggtaccgcggggcggcaccccccaagcaagagtttcttgacatcgaggacccgtaagaaggctgacagagcccctgtggccaattgaaaagcctctgagggtttagactggtccagctttgacatcccttcctggaaacagcatgaataaaacatcaatcatccaagtgggttcacgctagtgtgattctgccccctcccctattttccctagacatggtagtgggtctggagggacaggcgggccaggttccctgccataccccttccctctgccagcctgagcactgtgtgtctcagtctttgatccttgctacaggcaggagtggagcacagacttgttaccaggtctctctggcactgtcacatgcagcagacaggcagcattaagggtaccctagctctgttagggcagagcctgggaatgtgcattttgcagaaactcttgaaggttgttgtaagactgtgtagccggcctaccaggtccttttcatcctgagagtgacatgtccctcgttttctgcagtggccacctctctctctggcccttgcaaatgcttcccatccctcctgcatctggtatggactttcaggaccctggtctccctcgggtctaagaatcaccctccaaccagtggttcatttttctaggagtcccagtcagccccatgaatccacagacttcagcgaatggaagccctccctgagccgtgtttctggcttcaaccaagtcattgctgccttcctctcccctgtctctacacacaccctcagtggggtctgtgaggtctcatgctgggggcagggatctgtggtgaggggtgcttggcagtccttgttgccactctcaagcttcccaagccattcttcacccctttccaagcaagcttcaagcatccaggctgagcagcacggctcggtttggctctctgtcgcatcaggccctgccgctgttggggggcgctaccagcactccctcttttgcacaaactgatgatataaaaggccagtcctaggcacctaggaaaagtctagtgaactctccctgctagatcagcggtcattatgaccctgttgatttctgtgtcagtaactaagcacgcagcaggggagactttgcggtgggcagttcttcgtaccaagcccccccccccaaggatgctgtggcttgttttcagatccatctcattttcctaaaggtgaattctcatgcatggctgagagacatgtgtatgcagctctgcttctgtctcttaatgtcgcttaaggcccttatagggaactggtatatctacttgctccttaaagcaattttctttctgatgccaataggatgggggttaagacaggcagagctttatcactaacaatatagacagccactcttccttctgcctgcgtcttaaaaaataagctgtcccaaggacacaaatgtatattatccatacatgcacgcatatgctcacacacaaactcagactctgaagtctggtagcctgtgaatgttccttttgtaaaatgcttccaaaagcctctttgctccaaccctgtcctaaccatcagaaaccccaaagaaacggttaaggactccccctcagactctccctacccaagcccctacaccaggacctggccagtccttttaagacagactgggaggacacacaggagtcagcctgccccttctgagggcattttcgtgttgtgcagtgatgttcttccttggatgctggcctggaccagccaacgagaccctgcagtctatcccgccctgcctgtttgcttcctgtgcggtggtatcaatatgtaacagtgcctgtttctgctgatttcatgacatgttctggtttgtttctgatgttcgccgtgagcgttcttgtgccgtgttgatgcctttcgtagcattagactttgcacttttaaaaaaaaaaaaaacaaaaatgttgaagcatcgaggaagcatcgaacccagagtggaatgcatggtatggtagctggcctgggacagagggaccctttctcatcttcctttgagttctttgactatctgcttttccagcctctcccgtcttttgtatctggttcaaattattataaaggaaagaccctctgagtataccggttctgaaagacggcctttctgttttccactcatgctggggtttctagccacaccaggcagatgagaggaaaccgagcgagcaaacgaacctttgggacaaagtgccagatggcagctgagcaacagccactcaaatgccttcccagcaaaccaattgcaatatatagtttaaggtgttgttttacttctgttatattctaagccctgggcctccctcccttactcccgtcatgccagcaactcgcaatatttcagatgacgtttacatggtagcaatttccaaatcgctgcctgatgcgtattaagacatatccgtgggcttgctgcataactcaacgctttgttgattttgtttctgtttgaactcttggttgtagggggggaggggtggaaccccatgtgcgtgctggaatatgaagtctgagatgtaccccccaacaccccacgctggcgatacgtgagagttgttgaaagtcagcaagccgagcgcgcctgatgctctgtatcagtctctacttttatttttatgagtttgctctgtcaatggacaataaaccatattatcaaagagaaaaaaaaaaaaaaa

SEQ ID NO: 185 - DNA, 600 bp, Mus musculus
cgggcggccacggcgcgatggagtcgccggtcgagctgctggccgcgctacccgcgctggtcacggcgctggcgctgctgctcgcctggctgctgctgcggcgtggggcggcccgggtcccggccccggagagcaccgcctcggacgaggcccccggggctcctgcgccgcctgaacctccagagtcttgcgccccggagcctgcaccggagggaccgagccagtccgagcgcgtggcggaaccggaggagtccgaggcggaggagccagcggccgaggggaggcaggatgaagactcagacagtgagatggggccacccactgaagaacctgaggaagaggacggagcagccttttcctttaaatacagccctgggcagctgaggggaagccagtacaagaagatgatgaccaaagaagaactggaggaggaacacaggattgagctgacctctgacctcacctccctgtagcgagtcccctagtcccgggccacaaatgttcttgcaaacccttgtgaactgaagaataatgaaggtgtccttagcctcttcctgaaagctttccttccttttgacatcctaaaagcttgagagattt

SEQ ID NO: 186 - DNA, 1308 bp, Mus musculus
gaggcgcccagcccgggacgcggtagaatggcggacggaacgcagacctggggttgggtctgttgcagttccgcccgagcggtttgggaagtgcacagggcaaagatggcggcggaggagcaggaggcgttgtaggagttcatggcggtgagggcactgaggaggaaagggctcgtttcgtcctggagacggctggctgggacctgcagaagctgactgcagaggtgaacaaccctggtgtgatgtcctcagtgagtgaagatactccattccagaggaggtcacatctgggaggccgccatccaaaagaaagccactctgttggtgtaggaagtgacagctacattctcctgtgcctactgcataaccaaaaatgaaggagaactactgtttacaagctgccctggtatgcctgcttcattctgacattgacgccggtgatggaaacattaaatacattctctcaggagaaggagcgggaaccatttttgtgattgatgacaaatcagggaacattcatgccaccaagacattggacagagaggagagagcccagtacacactgatggctcaggcggtggacagggacaccaacaaaccactggggccaccttcagaattcattgataaggaccaggacattaatgacaaccctccagagtttctgcatgaaatctatcataccaatgtgcctgagaggtccaatgtgggtaggaacatcagttatccaagtgacagcctctgatgcagataatcccacctatggaaaaagtgccaagttagtgtatagcatccttgaaggacaaccctacttctcagtggaggcccaaacaggaatcatcaggacagcccttcccaatatggacagagaagccaaggaggagtaccatgtggtgatccaggctaaggacatgggtggacacatgggtggactctcagggacaaccagagtgacgatcactctgactgatgtcaacgacaactcagcaaagtttccaaagagtaaagagtcgaagctggtctttgataatgaccactgctcagcgagagcctcatcttttctttcactcctaatttacccagctttcaaaaggaagagtctggaaatccaagaatcattttcgtgattcttgcaaaaaactagaacaagatagcaaagacttaaaaacacaccgaggaaagttaaacagtatagagatcatgagaagtaaggaagtcattaaaactgtgtaactctggagaccagaatatctgagtcttgagatattttacttattaggtattaatcataaaaggcagtcatcaatg

SEQ ID NO: 187 - DNA, 2804 bp, Mus musculus
acggggaaaagaaaccgcccatcacacaccccagcacatcagcccaggaaacttataacctcgggagtcaggtccctcccctcactgtggttgcaaatctcctgaagagaggaccagaccagcagcctgctctaccacccagggcatctgcctctctcactggatactccagaattctctactcagaagtcaccaaaaagccaagatgttggtgctactggctggtctctttgtggtccacattgccactgccattatgctgtttgtctccaccattgccaacgtctggatggttgcagattacgcaaatgcatctgtagggctttggaagaactgcactggtggtaactgcgacggctccctgtcctacggcaatgaagatgctatcaaggcagtgcaagccttcatgatcctctccatcatcttctccatcatctccctcgtggtcttcgtgttccagctcttcactatggagaagggaaaccggttcttcctctcggggtccaccatgctggtgtgctggctgtgtatcctggttggagtgtcaatctacactcatcattacgcccacagcgaagggaacttcaactccagcagccaccaaggctattgtttcatcctgacctggatctgcttctgtttcagcttcatcatcggcatactctatatggtcctgaggaagaaataagccgaatacgctcatgggcgtctgggggcggggtgggctgggtaggaggaagcaacctaacctgggagggaagcaggagtcactgtgtaggaataacagagaggggaggggggtggggagagggaaggaagagggggagaggcccaaacccaaaccatatctggggcggtgggattctctactgccaagcacccatccttggaagaaagttgttggctgatatgctgatgcttccttgacgtcaccagagagtcctcctctagccaccaaatatggccccgtccatcctcaattacatacactcggggcctccccagctgccataccactggcgccactcttgagggtggctgctgggtcacacactgaggtcttccacatccatatcatcaagttctgatggtggttcaggtcttagcaagagcagatattgctcgatgctgaggctaagtctggaagccactttgtccttgtgacctaaaaccaaacatcaaatccagatcccatgtgcctgtagtgggagctttggccaggaagccaatgtgcatatttggtggcctttctaacaaaagtataggatgatgagagatggtttgtaagttcaagctgatggaattggtttagccaagaaatggaagtttctaccccagaggatcttggagacaggtggggacaggcagtgctcctcagtcacgtgtcaccgagctgtccctcatggaggcctcctgttgtgaactctgctagactctcacttacagccaaggcagcttttctggagtttttctagattctctagagccaaagatgataatgcctcacaaaacatagggtcaaagcatatgcccaccgcagtgctatagtaagtttgtgggtttttaggattcccccaaagcactcaatgtatcttgtatatgtaacaggggagaaatgcatgtgttcctttgacatacaattctgaactaggaatatttgaggaagtccaatgatgaccaacaacactggggaccagaatataacatctaaatgcagtagtcactgttgctttgacctgggctggagtggtctcctctcaacagctttcatcacactattttccagctaaagatggcaaagctgtaagccaattaacatatacaccaacctaaactaaagaaccagtcctgagggtgtgagaaaggtgctatctggttatggattattaagcaaaccatatttcatttatgttgagaagagaatgcctgccctcagggaaaaaaaaatgtaattgtgtgagatgaataaagtcctggtgataggcagacagtttcttttttaaaacaggagaaactcttagggcatccagacagatggtagctaaattgttggggctgcaggggtattcctgtataagacttagaggtagtatgatatctcagatttctgccttaaagggctttctttttagaaatagtttcttttattgcccttagaagatcacccccaggaagagtatgagctatcttttctacatttcttttcctaggaatattcttatccatttcttatatacatttcttttgggagggagtttttatgctatagttgctggtatttatgtaaagggaccattactaagtgtatttctctagcatattatgtttaagggactgttcaaggtaggttactgaactgccgggctgatgttagagacactggccagaaaagctataataagttcttaaattataatttgatcactatacatttgttctatgctgccttatgttcataagaatatcaacagacagctagagccagaaaaaaatagtcacattttgttaaaaagttgaattatgactggagtgaaccgtgcattcccttgccttttactttttttctgtgacatttacgtctcatgtaatttgcatcgcattggtgggttattctagtactgtatttggcttcttcattaataggatatttcacatactataattgtaaatattttgatacaaatgtttataactctagggatataaaaacaaattctgattccctaaaaaaaaaaaaaaaaaaaaaaaaaaaaaaaaaaaaaaaaaaaaaaaaaaaaaaaaaaaaaaaaaaaaaaaaaaaaaaa

SEQ ID NO: 188 - DNA, 2745 bp, Mus musculus
aggggaactgctactggggagccctgcttcccgggcttctgggtcagatcttgatgtcatgtctgctatgccaagatgccatccttgcttgggttaaagtgtctggggaaattgtgcagctctgagataggcaaagttccctcaccagagagagccagcctcaggaactcccacaggagactgcttattgaggacctgagtgtccccgagactcctgaccctgctcatcgcaggcgtggcacagtcatacatctggtctatctgtattctgctggctgtggtccaccagagctcaggtttagcagctatgatccatccgtggcccatcctcaggaccctcaccactcgtcggagaaacctgtcattcactgccataaatgcggggagccatgcaagggcgaagtgctacgggtgcagaccaagcatttccacatcaaatgcttcacctgcaaagtgtgcggctgcgacctggcccaggggggcttcttcataaagaacggggactatctgtgtaccctggactaccagaggatgtatgggacacggtgccacggctgtggggagttcgtggagggcgaggtggtaactgccctgggcaagacctaccaccccaactgcttcgcctgtacaatctgcaagcgcccatttccacccggagaccgagtcacattcaacgggagagactgtctttgtcagctctgtgcacagccgatgtcttccagccctaaagaagcctcctgctccagcaactgcgccggctgtggaagggacattaagaacggacaggcgctgctagctctggacaagcagtggcatttgggctgcttcaagtgcaagtcctgtgggaaggtcctcaccggcgagtacatcagcaaggatggctccccatactgtgagaaagactaccaggggctctttggggtgaagtgtgaagcctgtcaccagtttatcacaggaaaagtcctggaggcaggcgacaagcattatcatcccagctgcgcacgatgcagcagatgcaatcagatgttcacagaaggggaagaaatgtatctgcaaggttctaccgtgtggcatcccgactgtaagcagtccactaagacagaggagaagctgcggccaccaaacatcccgcgctcttcatccgatttcttttaccccaaaagtctgattcgtcgcacaggacggtccccagctctgcagcttctgtcgccaccctgtctgacgaactccaacaaaaaccccaggcagcccaccaggacctcctctgaaagtatctattctagaccaggctccagcatccctggttcaccaggccatactatctatgcaaaagtagacaatgaaatcctggattacaaggatttagcagccatccccaaggtcaaggcgatctatgacatcgagcgtccagatctcattacctatgagcctttctacacatcaggctatgaggacaagcaggagagacagagccttggagagtctccaaggactttgtctccaactccatctgcagaaggttatcaagatgtccgggatcggatgatccacaggtccaccagccagggctccatcaactcccctgtgtatagccggcacagttacactccaactacgtctcgctcgccccagcacttccaccgacctgagctcttgtctcctggtgtgcacaggtggtctcccctgcgcaccagcagcttcagctccacccacagcgactcccgtcccaacccccccttccgacaccacttcctcccccatgtcaaaggcaatgagccgtccagcggccggaactcccctctcccctaccggcccgacagccgccctctaactccaacttacgctcaggcccctaaacatttccatgttccagatcaagggatcaacatttaccgaaaaccacccatctacaaacagcatgctgccttggcagcccagagcaaggcttcagaagatatcatcaagttttccaagttcccagcagcccaggcgccagatcccaacgagataccaaagattgagacggaccactggccgggtcccccctcacttgccgccgtaggaactgacccgaggcgcagatcaagtggcagagaggaagatgaagaggagcttttgagacgccggcagcttcaagaagaacagttgatgaagctcaactcaggcctggggcagctgatcctgaaggaagagatggagaaggagagcagagaaagagcatcgctggccagtcgctatgactctcccctccactcagcttcccatgctccatcatctaaaacttcatctctccctggttatggaaagaatggccttcaccggccagtttccacagacttcgctcagtacaacagctacggagacatcagtggcggagttcgagactaccagaccctcccagatggccacatgcctgcagtgagaatggacagaggagtatccatgcccaacatgttggaaccaaagatatttccatatgagatgctcatggtgaccaacagagggcgcaacaaaatcctgagagatgtggatagaacccggctagagcgccacttagccccagaagtattttgggagatctttgggatgtccatacaggaatttgacaagttacctctttggagacgcaacgacatgaagaaaaaagctaaactcttctaagtccctcgagtaaacgacaatcaggaaacgaactctcagtggcggtggtgcgtagaacattacgctaaggcccagaactgatca

SEQ ID NO: 189 - DNA, 5674 bp, Mus musculus
cttcccaagactttgtgtttcctagcctgagaattgtaggctgtgatggaggaggcattgctgcagagaaggtgttatcctgcaccgggttcttgatgacatcaggatcgcagccccaaggcaaggggctttgatcctaggagctttgtttagggctctggtcacaaagcagagggtgatgtgccaggggcctgctgggaaagcagtattgtgttgactgggatttttattgttggtttgtttaactaaaaccagccagttttatatcgaagaaaaatataaaaagtaaagatttcagcccaacatgaaaaatgaacagtgctcactcagctacgtgtggtgtctgtgtggcatacacagccgtgcttagctttgctgtctttgtcatgttgccactactctctgatgtttcacttccggacagcacttgtgctcatgagtgctttaaatggggcgggttcaagggggcaccttgaacttgggccatggccatgggctttggaggctacagaacattaaaaacttgagtcgttcccctgtacttctccatccgcctgtttgtatctccagtactaaaagaactattgataccgtaggtaaaaattacccatttctgaagagagggtaagaaagaggagcaaacatggctttgctcctactctgaatttagtctgaagacagtgagaaaccttgagtttggtgataggggatggaaactgtccagtccctcagtttccccagaagtaatctacttgtctgtgttggcaggtggaaagcaagccagccaagatggatatctacgacactcagaccttgggggttgtggtctttggcgggtttatggttgtttctgccatcggcatcttcctggtgtcaaccttctccatgaaggagacgtcgtatgaagaagcccttgccaaccagcgcaaggagatggcgaaaactcaccaccagaaaggagagaagaaaaagaaggagaaaaccgtggagaagaaaggaaagaccaagaaaaaggaagagaaacctaatgggaagatacctgaacatgacctggatcccaacgtgaccatcatcctcaaggaaccagtgcgtgtatccgctgtggctgtggctccaacttcagtccattcttctgtgggccatacccctatagccacagtaccagccatgcctcaggaaaagctggcttcctcccctaaggacagaaagaagaaggagaaaaaagtggcaaaggtggagccagcagtcagttctattgtgaattccatccaggttcttgcttcaaagtctgccatcttggaagccacacccaaggaggtgcctatggtggctgtgcctccagtgggctctaaggccagttctcctgccaccagcagtcagggcaagaagggacagggagcccagaaccaggccaagaagggggagggagcccagaaccaaggcaagaagggagagggggcccagaaccaagctaagaaaggagagggggcccagaaccaggccaagaagggggagggggcccagaaccaaggcaagaagggggagggagcccagaaccaggccaagaagggggaaggaggccagaaccaggccaagaagggggagggggcccagaaccaaggcaagaagggagagggggcccagaaccaaggcaagaagggggagggagcccagaaccaggctaagaagggggagggggctcagaaccaagctaagaagggtgagggggcccagaaccaaggcaagaagggagagggggcccagaaccagtccaagaaaggagagggggctcagaaccaggccaagaagggggaagggggccaaaaccaggccaagaagggagagggggctcagaaccaggccaagaagggggagggagcccagaaccaagctaagaagggggagggggtccagaaccaggccaagaagggggtagaaggggcccaaaatcagggcaaaaagggggaagcaaaccaaaaccaggctaagaagggtgagggaggccagaaccaaaccaagaagggggaaggaccccagaaccaaggcaagaagggagaagcagctcaaaaacaggacaaaaaaatagaaggagcccagaatcaaggcaagaagccagagggaacctcaaaccaaggcaagaagggggagggggcccagaaccaaggcaagaagggagagggggcccagaaccaaggcaagaagggagagggggcccagaaccaaggcaagaagggagagggggcccagaaccaaggcaagaagggagagggggcccagaaccaaggcaagaagggagagggggcccaaaaccaaggcaagaagggagagggggcccagaaccaaggcaagaagggagaggggccccagaaccaggccaagaaaggagagggggcccagaaccagggcaagaaaggagagggggcccagaaccagggcaagaaaggagagggggcccagaaccagggcaaaaaggcagagggggttcaaagtcagagcaagaaaggggaagggacccagaatcagggcaaaaagggggatggaaatcccaaccaaggcaagaagggggagggggcttccaaccagaacagaaagacagatacagttgctaatcagggcacaaagcaagagggtgtctcaaaccaggtgaaaaagtcagaagggtcccctaatcaaggtaaaaaggcagagggagccccaaaccaaggcaaaaagaaagatggatcccccagccaggccaaaaaagtggatgcagctgccaatcagggtaaaaagtcagagatggctcctgcccagggtcaaaaggcaagcatggtccagagccaggaggcaccaaagcaagacgcacctgcaaagaagaagtctggttccaggaaaaaaggagagcctgggcccccagattgcgacggccctctcttcctgccctacaagacactggtctctacggttggaagcatggtgttcagtgagggcgaggcccagcggcttattgagattctctctgagaagactggagtcattcaagacacctggcataaggccactcagaagggtgaccctgtagcaattctgaaacgccaactagaagagaaagaaaagctgctggccacagagcaagaggatgcggccgtcgccaagagcaagctaagggaactcaacaaggagatggcttcagagaaggccaaggctgcagctggggaggccaaagtgaagaagcagctggtagcccgggagcaggagatcgcagctgtgcaggcacgcatgcaggccagctatcgggaccatgtgaaggaggtgcaacagctgcagggcaagatccggactcttcaggaacagctggagaatggccctaacacccagctggcccgcctacagcaggagaactccatcttgagggatgccttgaaccaggctaccagccaggtggaaagcaagcagaacacagaactggcaaagctccgacaggagctcagcaaggtcaacaaggagctagtggagaagtcagaggcctcccggcaggaggagcaacaacggaaggcgctggaagccaaggcagccacctttgagaagcaggtcctacagttgcaggcatcccacaaagagagtgaagaggctctgcagaagcgcttggaggaggtcacccgggaactctgccgggcacaaacgagccatgccaacctccgagcggatgctgaaaaggctcaggaacagcagcagcgagtggcagagttgcacagcaaattacagtcatctgaggtggaggtaaaaagcaagtgtgaagagctgagtagtctccatgggcagctcaaggaggccagggcggagaactcacagctcacagagaggatccgttccatcgaagcccttctggaagcaggccaggcccaagacacccaggccagccacgctgaggccaaccagcagcagactcgtctcaaggagctggagtcccaggtgtcgtgtctggagaaggaaaccagtgagctcaaggaggctatggaacaacagaaggggaagaacaatgacctccgggaaaagaactggaaggccatggaggcactggccttagctgagcgggcctgtgaggagaagctgcgttccctaacccaggccaaggaggagtcagaaaagcagctgcacctggctgaggcccagaccaaggagaccctgctggccttgcttccggggctctctatctcagcacaccagaactatgccgagtggctacaggaattcaaagagaagggctctgagctgctgaagaaaccacctaccctagagccctccatggacatagtcttgaagttgagggaagctgaggagacccaaaactctttgcaggctgagtgtgaccagtaccgcaccatcctggcagagacggagggcatgctcaaagacctgcagaagagtgtggaggaagaagagcgagtgtggaaggccaaggtgggagctgctgaggaggagctgcacaagtcacgggtcacagtgaaacatctagaagacattgtggagaagctaaaaggagaacttgaaagctcagatcaggtaagggagcacacatcacatctggaagcggagctggagaagcacatggcagcggccagtgcagagtgtcagaattatgccaaggaggtggcagggttaaggcagcttctgctagaatcgcagtctcagctggatgaagccaagagtgaagcccagaaacaaagcgatgagcttgccctggtcaggcagcagttgagtgacatgaggagccacgtagaggatggtgacgtggctgggtctccagctgtccctccagccgagcaggaccctatgaagttgaaaacacagctggagcggacagaagccaccctggaggctgagcagacacggcggcagaagctcacagctgagtttgaggaggctcaacgcacagcgtgtcggatacaagaagagctggagaaactccgtgctgctggccccctggagtcgtcaggaaaagaagagattacacagctgaaggagagactagaaaaagagaagaggttaacaagtgacctgggccgtgctgccatcaaacttcaggagctgttgaagacaacccaggagcagctgacgaaagagaaggacacagtgaagaagttacaagaacaactgggaaaagcagaggatggtagcagctcaaaggagggaacctctgtctgagtctcctcggcaaactgttcaacttaccaaaatgccttacacattccttacaaataaaccaaccaacacagcgttatccaggcccaacttccagtgaagccattggagacaagtctcagaaccacagaataaagcttgcggaaccccagtctgtaagagaacctttgtcacacttgataaacactattcccgggagcagccctggaccacctcgagcagacgccaaagccctcctcaacgctgacagaccagggtgtgctgggagtccaggactctcggggtttatgtcaatcagtgcaattgtctgtatttctcagtggggccaggttgggaagcaacaggccaggtggtgagttctcagaggctgctgagcagactggagggcctcagcccagcccagcaaggctgcagcccatcacccctggaagttgccaagcagaactgacatgtgactgcctggatgtcaatgccattaaaaccaacgtgttgc

SEQ ID NO: 190 - DNA, 5644 bp, Mus musculus
gctaaaccctggtgtgaagcgggacaggccagggcaggaggtggccaaccacaccccgcaggcgcgcacttggcgggctgcagaccccacgggcagacgccgagatgcgcagtcggaggctcctgagcgcggcccaccttctctgcttgtgcgcggtcgcgctggccgccccagggtcccgctttctggtgacagccccagggatcatcagacccggagcaaatgtgactattggggtggatctcctggaaaatagccccccacaggtccttgtaaaggctcaggtgttcaagatagcttccaacaaatcgagatccatcctggaagcagaaggagtctttcacagaggccatttcaagactctcgttcttccggcactacctctgagcagtgcagataagatttatgagctacacataaacggacaatcagagaatgagatcgtattctccaacaggacacgtttaacatttgagagcaagagtatatctgtcctcattcagacagacaaggcattctacaagccgaagcaggaagtgaagtttcgggtgctcacactctgctcagatctcaagccttataggacatccgtggacattttcattaaggatccgaagtctaatgtgatccaacagtggttttctcagaaaggtgatcttggagtcgtttccaaaacttttcaactatcctctaatccaatatttggtgactggtccattcaggttcaagtgaatgatcagcaatattaccagtcatttcaggtcctagaatatgtgttaccaaagttcgaagtcaccgtgcagaccccgctgtattgttccttgaagtctaaacagttaaatggctccgtcatagcaaagtatacatacgggaagccagtgaagggaagtctgtcacttacatttttacctttgtctttttggggaaagaagaagaatatcacaaaaagttttgagataaatggatttgcaaacttctcttttgataattatgagatgaaaaaggtaatgaatttgaaaccgctaacggatgtctcggaagggagttatgagaatgtggacccgtcctttcctgggccggcagagattatagctactgtgacggaatcactcacaggtatctcaagaatggcaagcaccaatgtgtttttcaagcaacatgattacatcattgagatttttgattatacgactgtcttgaaaccatctctcaacttcacagccactgtgaaggtcagccgctctgatggcaatcaactaactcctgaagaaatagaaaatgatttggtcacagtagtgacccagcggaaaaataaccaccctgagagtcagagagatcaggaaatggattatatccagaccgtaaattatactatcccccaaaatggaatcattaagattgaattcccagtcatgtccatttccggcgagctacaactgaaggcttattttcttgatggtacaagttctgtgacagtccacagtatgttcacctctcctagtaagacgtacatccagcttaaaaccagagatgaatatataaaggtggggtcaccttttgatttgatggttagtggcaacagacaattcaaggacttaagctatatggtaatatcaaagggacagttggtggctgcaggcaaacaaagttcaagaactttctctttaacaccagaggcttcctgggctccaaaggcctgtataatcgcatattatattgcagaggatggggaaattataaatgatattctaaaaatccccgttcagcttgtttttgaaaataaggtaaagctgttttggagtaaacctacagtcaagccatctgataaggtctctctcaggatctctgcgacacagtctgactccctggtggggattgtagctgttgacaaaagtgtaacattgatggaaaactccaacagtattacaatggaaaccatggtccatgaactggaactttataacacagaatattatctaggcatgttcatgaactccttcgctgtatttcaggaatgtggtctctgggtgttgacagatgcaacccttataagagatagcattgatgaagtctacgatactgaagagtattctgaacgctttgcagaggaaaatgaggcaaacctggttgattttgaagatgcttcttcagttaacaatgtacatgtcaggaagaattttccagaaacatggatttggctagacgcctacatgggatctaagatttatgaagaatttgaagttactgtacctgactccatcacttcttgggtggcttcggcttttgtcatctcagaagacctgggttttgggttaacaaccgttccagcagagctgcaagccttccaaccgtttttccttttcctgaatcttccgtactctgttatcagaggtgaagagtttgctttggaagtatccatcgtcaattatttgaaagatacaattaaggttgtgatactcattgaggaaagtgacagctttgatattttaatgacttcaaatgacaccaatggcaccatataccggaagactgttcaagttcccagggataatggggtcactcttgtttttcccatcaagcccacgcacttgggagagattcccatcacagtgacggctgcctcacccactgcctctgatgctgtcacccagacaattgtagtaaagcctgaagggatagaaaagtcgtattcgaaatctgtcttattggatctgacagatagcaacgtagaaagtaagcagcaatctatgagattctcctttcctcctgatacggtcattggcagtgaaagagttcagatcacagcaattggagatatccttggttcctccatcaatggcttatcttcactgatccggatgccttatggatgtggtgaacagaacatgatatattttgctccaaatatttacattttggattatctgactaaacagaaacagctgacagttaatttaaaagaaaaggccctttcatatatgaggcaaggttaccaaagggagcttctctatcagagggaagatggctccttcagtgcttttggggacattgactcttctgggagcacttggctgtcagcatttgttttaagatgctttctggaagctgattactatatagatattgatcaggatgtgttacacagaacatatacttggcttaatgcacataagaaattcaatggtgaattttgggagccaggaagagtgattcacagtgaacttcaaggtggcaccaaaagcccagtaacacttacggcctatattgtgacttctgtcctgggatacaaaaagtatcagcctaatatcgatgtacaagactcaatcaagtttttggaatttgaattcagcagaggaatttcggacaattataccttagcaattatatcctatgccctgtccacagtcgggagccctaaagcagaggaggctttgaacttgctgatgcagcgatcagaaaaggaaggagacacacagttctggttgtcatcaggacctgcgctctctgggtcctggcagccgcgctccgtggacatcgaaatcgctgcttatgcactgctggcgcacactctgcaccatgtgtctgagggaatcccggttatgaggtggctcatccagcaaagaaacagcctgggaggttttgtatccactcaggatactgttgtggccctgaaggcattatctgaattttcagcccttgtgcacaaggaaaatacagatatccaactgaccgtcacagggcccggcatccccagatccatacacttccgaattgactcccagaacctctttctccttcaccaggaagagcttcatgcgctagatcccatcaccgttaatgtttctgcgcatggctcgggatttgctatttgccagcttaatgttgactataacgtgaaaggttcaggttcttctaaaagacggagatctaccgaaaatcaagaagtttttgatttagacgtcattgtgaataatgaggacgacattagtcacctgaatctgaatgtgtgcacaagtcacttgggttcagagaggacaggcatggtccttatggaagtgaaccttctcagtggctttagtgcatcttcagattcaattcctctgagtgagaccctgaagaaagtggaatatgataacgggaaactcaacctttatttagattctgtaaatgaatcccagttttgtgttaatattcccactgtgagagactacaaagtttcaaatattcgagatggttcagtatctgtaatggactactatgaaccaaggagacaggcagtgcgaagctacaacacccaggtgaagctgtcctcatgttacctcagtccagacaccaactgcaagtcacacacggacggagccacggactcccttcgacgttcttcgagccttctcgtcttttgctccgtccttctgtactttgtgcaacattgattatgatttatttttcaaggactccgtctaaaactagcatttccagaaagtcaagtgtgattgttttctttctacacctgatgattgcctctgacggttctgaaaatcaattgtttccctttcctgggggggcctggggagtgtaacaggccagagcttgtgtaagcacgtaaaacaattcacccaatctttgtgtggaagatgaccaggatgacgacgccatgtctctatatctccttctctaggaaagtttattagatgcatttgtttttgctagaataaaaatgttattttccattattcctgttttgtaaaagatgtgaggggtgggggttctcctgtatccagtccttcagcatctgccctggtgttatcatcgcagcaacaggaggtactttgctctctgttccttcccacatctggcctgactctgctgtaggcccatcccactgtctcagtgagactctctgatcagcacgctgactctttcttagaatgtaggtagtaagtttttaaaagtaaaatggtctttttctgctgcagctctgatgacctgccccagacttgactctccccaatttctttatagagaaattttcctgtcttaaacatttcctgtatcatgctgctgtattacactgaaagttgccttcaagggttgctggggtgttctcttctgtcatggcgacagtctcactctgaccctgcttcaggagtgcaagctggagagccctctgacatatgcccacgtgacttggcctagaagagctcattccaggagacactctgaactgagagtatgaggaatattgctctgtgtcacagcctacccatccccccgggaaacaagctgagcttgaagacctcagagagtcaggacacaattctgcccgaagttctatagtgctggtcctggctgctgttcagtctcttccagccacagggtctgggtattgggctgtatggcgcccagtgatgctgtaagtcattaagaagattcttgtgttctcagtcaaatttattctggagtatgggatttattggtttttcttttttgtaagcacttaaagaaatattctttcctcatctcttcattccttttctcccctcttctctccctttcagtgttccctgttgagtactctgaaataggttacatatgtaaaaattcaaagattaaaacaaatcaatctaaaaaaaaaaaaaaaaaa

SEQ ID NO: 191 - DNA, 9263 bp, Mus musculus
acgcctcggtgctccggaccccggccaaggccagggcgctgaagcgagcgcgaggccgcggagggatgctgagcgcctggagaggggcgagccgcgcctgaggctgtgaggttgcgggcagacgctcccagctctcggcgcccgtgcccactggcggccggaacgcccagaaccgctcgcccaggtccagcccggccccctcggcccccacgttgggcttgagttcttggcggccgctgcgctggccggctccccccgggagcggggcaaccttgacgggctttttgtctcgtgccccggccgctctccgcgtcctcctcctccagatgccttttttctgcccctcctcaccgggtgcagactgccagcatcggctgcggctcagcgcgggattcgggctcgtttccccgggggggctaaggagggacagctcttccccttcttcgatgggattttcctctcctgccggaatgaactttcattgattccgtcttctacatttactgaccaattccctgggcgtatttgtggtacttcctccccccgccccctcctgaatatataatctgtaaaatggagaacgaaatcttcactccccttctggagcagttcatgaccagccccttggtcacttgggttaaaacgtttggacctctggctgcaggaaatgggactaacctggatgagtatgtggctttagtggatggggtattcttgaaccaggtcatgctccaaattaatcctaagtcggagagtcaacgagtaaataaaaaagtcaacaatgatgcttcccttagaattcacaatctgtccattttggtgaaacagataaaattttattatcaggagactttgcagcagttgattatgatgccattgccagatatcttaatcattggcaaaaatcccttttctgaacaaggtacagaagaagttaaaaagttgcttttgctcttacttggttgtgcagttcagtgtcagaaaaaggaagaatttattgaaaaaattcaaggtttagattttgatacgaaagcagcagttgctgcacacattcaagaggtaactcataatcaagaaaatgtatttgatctgcaatggatggaagtgacagatatgtctcaggaagacatagaaccactcttaaagaatatggtgtcacatctaagaagactgatagatgagagagatgaacattcagagactattgtagaactctcagaagagcgagatggtgttcatttcctaccccatgcctcttcatctgcacagtcaccctgtggttctccaggcatgaagcgaacagaaagtcgacagcatctctcagtggaattggctgatgctaaagccaagatccgaagacttaggcaggaattggaagaaaagactgagcagttactggactgtaaacaagaacttgagcaaatagaagtggaattgaagaggctgcaacaagagaacatgaatttgctttcggatgctcgatctgctagaatgtaccgagatgaattggatgccctccgagagaaagcagtcagagttgataagcttgaaagtgaactcagtagatataaagagagactacatgatattgaattttataaggcaagagttgaggaattaaaagaagataatcaagttttattagaaacaaaaactatgctggaagaccaactagaaggaactcgggctcgttctgacaaactacatgaattagaaaaagagaatttacaactaaaggctaaattgcatgatatggagatggaacgagatatggatagaaagaagattgaagaattaatggaagaaaatatgactctggaaatggcacagaaacaaagtatggatgagtcattacaccttggctgggagctggaacagatatccagaactagtgaacttgctgaagcaccacagaagtccttgggccatgaggtaaatgaattaacatcaagtaagttattaaagttggaaatggaaaaccagagtctgacgaaaaccgtagaagagctccggagcactgcggactccgcagcaggcagcacttccaaaatcctaaaagttgaaaaggaaaaccagagactgaataaaaaggttgaaattcttgaaaatgaaattattcaagaaaagcaaagtcttcagaattgtcaaaatttaagcaaggatctaatgaaagagaaagctcagcttgaaaaaacaatagagacgctcagagagaattcagagaggcagattaaaatattggagcaggaaaatgaacatctgaatcaaacagtgtcttccttacggcagcgctcccagattagtgctgaggcgagagtgaaagacattgaaaaagaaaataaaattctccatgaatctatcaaagaaacatgtggaaaactaagcaagattgaatttgaaaaaagacaaatgaaaaaggaattagagctttataaagagaaaggagagcgagcagaagaacttgaaaacgagttgaatcatcttggaaaggagaatgaattgttgcagaaaaagataacgaatttaaagattacgtgtgaaaaacttgagacattagaacaggaaaattcagagctagaaagagaaaataggaaatttaaaaaaactttggacagctttaaaaaccttacttttcagttagaatctctagaaaaagagaattcccaactcgatgaagaaaacttagaactgcgaaggagcgtggagtctctgaagtgtgcgagcatgagaatggcccagctccagctagagaacaaggagctggagagtgagaaggagcagctgaggaagggcttggagctcatgagagcctctttcaagaagacagaacgcttggaagttagctaccaggggctagacacagaaaatcaaagactacaaaaagctctagaaaatagcaataaaaaaatccaacagttagagagtgagctacaagacttagagatggaaaatcaaacattacaaaaaagcctagaggaactgaaaatatctagcaaaagactggaacaactagaaaaagaaaacaagtcattagagcaagagacatctcaacttgaaaaggacaaaaaacaattggagaaggaaaataaacgactccgacaacaagcagaaataaaagataccacattagaagaaaataatgtgaaaattgggaatttggaaaaagaaaacaaaactttattcaaagaaattaatgtatataaagagtcctgtgttcgtctaaaagaattagaaaaagaaaataaagagcttgtaaaaagagcaactattgatattaaaaccttggttacattacgtgaggatttagtcagtgagaaattgaagacacaacaaatgaacaatgatcttgagaaattaactcatgagcttgagaagataggtttaaataaagagcggctcctacacgatgagcagagcactgatgacagtaggtacaaacttttggaatcaaaattagaatccactcttaagaagtcccttgaaataaaagaagaaaaaattgctgctttagaagctcggttagaagaatctacaaattacaatcagcaattgcgccacgaacttaaaacagtgaaaaaaaattatgaagctctcaaacagagacaagatgaagaaaggatggtacagagttccattccagtctctggagaagatgacaagtggggccgagaaagtcaagaagcgactagagagctcctgaaagttaaagacaggttaattgaagtagaaagaaacaatgctacgctgcaagcagagaagcaagcactgaaaactcaactgaagcaacttgaaacacaaaataataatttgcaggctcagattcttgcactgcagaggcagaccgtgtcattgcaggagcagaataccacgcttcagacacagaatgccaagcttcaggttgaaaattctacccttaattcacaaagtacttcacttatgaaccagaatgcacagcttctaatccagcagtcttccttagaaaatgaaaatgaatctataatgaaagaacgagaagacttgaaatctctgtatgatgctctgataaaagatcacgaaaagctggaacttcttcatgagcggcaagcttcagagtatgagtctctgatctctaaacatggcaccctgaagtctgctcacaaaaatcttgaagtggaacataaagaccttgaagaccgttacaatcagttattaaaacagaaaggacaattggaagatttggaaaaaatgatcaaaacggaacaggaaaaaatgctgcttgaaagcaaaaaccatgaagtggtagcttcagagtacaagaagctttgtggtgaaaatgataggttaaattatacatatagtcagcttttaaaagagactgaaattttacaaatggatcataaaaatttgaaaagtgttctaaataattctaaattggaacaaacaagattagaagctgaattttcaaagctaaaggagcagtatcagcaactagatatcacatctaccaagctaaataaccagtgtgagttgctcagccaacttaaaggaaatttagaagaagaaaatcgacatctacttgatcagatccagacactaatgctacagaacagaacactgctggagcaaaatatggaaagcaaggatctctttcatgttgaacaaagacagtacattgataaattaaatgaattgagacgacaaaaagaaaaattagaagagaaaattatggatcaatacaaattttatgacccatctcctcctagaaggagaggcaactggattactctaaaaatgagaaaattgataaagtcaaaaaaagatattaatcgggaacgtcagaaatctctaacactaacacccacccgctcagactccagtgaaggatttcttcagctgccccatcaagacagccaagacagctcttcagtaggatcaaactctttagaagatggccaaaccctggggaccaagaagagcagcaccatgaatgacctggtgcagtccatggtcctagcaggaggacagtggacaggtagtactgaaaatttggaggtccctgatgatatttcaacgggtaaaaggagaaaagaattgggagctatggccttctctactacagccatcaacttttcaactgtcaactcttctgcagccttccgatccaagcagttggttaataataaagatactacatcctttgaagacataagtccacaaggtattagtgatgattctagtacgggatcaagagttcatgcttcaagaccagccagccttgatagtggcagaacatccactagcaatagcaataataatgcttcactccatgaagtcaaagcaggtgcagttaatatccaaagcaggccacaaagccacagcagtggagatttcagtctgcttcatgatcatgagacttggtctagcagtggtagcagtccaattcagtatttgaaaagacagaccaggtcaagccctatgctccagcacaaaatatctgaaacaatagagagtcgagcccatcacaagatgaaagctggctccccaggaagtgaagttgttactctacaacagtttttggaagaaagcaacaagcttacctcaatacagttgaagtcctcgagtcaagagaatcttttagatgaagtaatgaaaagtttgtctgtgtcttccgactttctggggaaagacaagccagttagctgtaccctggccaggtcagtaagtggaaagactccaggggacttctatgatagacggacaactaagcctgaatttttgagaactggtcctcaaaagactgaagatgcctacaccatcagctctgcagggaaacctacaccaagcactcaaggaaagataaaactagtaaaagaaacctctgtgtcaagacaatcaaaagatagcaatccttatgccactttacctcgtgcaagcagtgtgatctctactgctgaaggaacaactcgaaggacgagcatccatgattttttgagcaaagacagtagactgcccgtgtcagtcgattcatcaccacctactgctggtagcagcagcactacagcatctaatgtgaacaaagtacaagagagcagaaattcaaaaagcaggtctagggagcaacaaagctcctaattcagtgacccactgcatgacatgtgggcctgggagagaaaagtgtccttcagtttctcagtgtgaagactttatttctgaagtaacaagacacctagcaactataggaactattaaaaacagtaaggagattttaacacatcccttcgtgattagagcagggaagagatataaacttcattcttccttgaatcaaggagcactactggattcagctgccaaaagttttagaaggttttaggacactgtacagtgcactaagctctactgaataaaggacattctctcactaaggaccgagtgtttaaggtcaagtattctaaggaacagcctacttctttcaacatttgtttattaatttatccatttttgcttactgcttctaagtattatccaaaaactagtcatttatatttagttgtacaaatctaaattaagtgttgtagtattttgtggaatgtactatatatcaagatacagaggaaattgttctggcatgtcagccttttttctttcattagcagagtgcatgtgttggtacgctggttattgtttttgtttctagagccaattgtttggatgcactgcaaaggaagtgcagctcataagatatgcagtaatttccataatgaaatacaagagtgataaaaattatatattaatcttaccactttccctgataagctgcactaggtattcacaaatggatccaagataaaatcatttttctgaaactttttttagtgagatggttttccagcaaatagcatttacaagataaagtgattatgtttttaactcatttcccttctttggtattgggttatgtgtgtgtgtttttttacgtgagagctgattattgcttaagaagttttcttatggcaaaataatgtaaataatttctatgacctacattttttcagaaactcatttactattacggttgtcatttattactaagaatttttctgtttttgtcctttataatattatattaaacttaataactattataggtaatcttgaaatatttgtatgtgtttgttaccttaaacatttgaaagaagcacaaaaaagtagatttagttatcccagagaaacaccaattttttagtagtagcaattttatatcacagttttattttcttatgaagtcaaaaaaaaaccacattgctactcattaaggcaagttcattatttaacataaaaaccagaataatcttttgaaatgaaaaaaaaagtactatttttattttaacagtatacttcttaagctcttattaccagctctagagaattttttggaataattatgcattccctaatgtgtgctttacaaactgtgtatcatcataacccagtagccgtgacagaaatctcttttctttgcacccccatcctcctctttttgtttctctctcgcccccactctctgtaatagtcactagcaggttgtgtttatagcaaccattggaaagaccgtcaataaaaacgacaaaaaacatttagttgttcagaaattgaaagttagagaacttggatttatttaactcagtgctgccagaaaataatgctataaaattaaattactttaaaactcttgaatgaaaggtgctatttaaatgtaaatactaagggtttactgaaacacgatacacatactaaaaatctattctctagactttgaaatcttctttgtgactccttagattcaagtctcaaattggtaaatgggtatcatggaagtctagagacagttgcatgtaaaaaaaaaaaaaaaaactgtaaattcactgttggttgagaagttgaaaatgagtgtagaattatgttttagcttaatatataagagaataagttaggtttatattaactagcatccaatttgcacaattagcacacatcccaggacagttaatgaatgagtgtgaggtgacctaatgagggtaaagcagtttgaacctgctgaggtaatcagcacatcagctagaaatactgtaatgtattaacttggagtaggccaaccctgaggagaaaaaaagagaaaactaagagaatacaatgagactagtgcattattctcaattatattaattgccttcctcatagcaattcaacaaaggactagccgataactccatgatttttttttctttgaaatctacttcagaagcagactttgtaggaatctaagccaaatggaaattaatccaaaccatttttctaaccaagcctacacccaactatctggtgctattcctaaacctccatgaacactttaaaaatgagaataacagcatctgcccagagctctaataacatgcctcctagctggccatggaaatgttttggttcaaggttttctgagttggtggttaccaaagagttcacgagacaggttcatgtgaagcacctttcatgcaaggcatgttaaaagcctatttaaaaatcactgtgcacattacagaattgtaaccacctcacaaatggattactacagcctgaactgtcttaacactttatgtcaggaagtaaaatcaatactgtaccaaatctggaattgtgatggggaattatgcattctaaattacttttgtactttaagttactttttatgaaaaaaagtgaattgtctttcttttcagctatttgtcctgagatgtattttttttctttgagtcttgaatatgaatagtacaaaaagagcccattttataattataaatcttgatatacaggttaagctatttggacaatgaaaacgccttaaatggaatgcttaatgggtaatgttgcacttataacatcctctgacaaaatctgattttaaattgtcttttttatttctactagttttgttttcaatgtttgccattgtactcacagctgttattaaataccaaatcaaataatataaaaagctgtaacatttcctttaaaattaatgctaataagggaggtagagttgaataacaaaacaactttcctcggtggcacctgatgtctgtcacaggagtccatgcacgacaagataccattgtttgagatggtttttatagtcactttctttttctttaattctccttaaaagtatttatgttggactaactgatataaaaagaaataaaaacaaaaggtaattttttaacaaa

SEQ ID NO: 192 - DNA, 368 bp, Mus musculus
agcaagctttacctgtcactgtctgctgccatacgatgctgggaggcctggggaagctggcggccgagggcctggcccaccgcacagagaaagccactgagggagcagttcacgcagtggaagaggtggtgagcgaggtggtgggccacgccaaggaggttggagagaaggccattaatgacgccctaaagaaagcccaagaatcaggagacagggtggtgaaggaggtcactgagaaggtcacccacaccatcactgatgctgttacccatgcggcagaaggcctgggaagactgggacagtgagcctgcctaccagcatggctggcccttcctgaaggtcaataaagagtgtgaaacgtgaacagg

SEQ ID NO: 193 - DNA, 2784 bp, Mus musculus
gatcggttgcgtaaatacttttgaaagaccctattagcgcgcggggcgccacgtttgatctgtggacgggcttgggcgggtgcagtgccgggcagagagccacgcacgccatggagtctatgggtcggcaggaccgcaggctgcatcagcagcttaaggaaagcagtagccgcttccagacgttaatgaagcggctgatagcgaagtacaaccagccctttgaggacgacccgttggtggagatgaggacgttaacctacgagacgccccagggtacgaagccctcccttcctgttggcactgggccagaacagtgggcctagaatttgcaatgctgcatttgtcccccttgctcctagggaccttgaatccctgagttgctgatttccaatttaatttctctgaaagaaatgcctggagacacagtgcagcctggttttttaaaatgcctggcatggaagttcgagctaattgattagcggtacaagtgactctgtaaaataaggatgttgacaatcatgggtaagccgtatggttgtgtataacatcaccagagtacctgtcaggccattggaacagcacccaggactgctccgctctcatgggctttgctgtataaatgtagacccatctgttttggacagtccccattatctgccacctctgacgcattttatttaatgttgtgagtgtacttactaccttaaacctcatcggttctctaactgggataagtttgttatttgatgaggtcgtatccttccctaagacccatccctgatgtttgtctgaatttattgataaaatcggatttcggatcacagtctgccaggggtctacaagtgcagtctgtcttttgtcttattggctgttcagggcacgtgttgggtaagcattttaaataagcagaaactgaactaattctacaaagaggttgcttttctctggatgggatcaggacacagcaatataggaatccataagtgtgctgtctgactcttggcttttctgtgctcttgcggctgtttgtgaaggggtaggcagtgtctggagtattttggactgcccatctgtcttcaatgatatattctgtcagtgatatataactgatgtcagttatatgagaacagtgaagttgctgaagagtttgagactatacaagttggtataagagccctccctgaggtctggccaacacatagacacctagggctgcagttgtcggttaacaaatctatgtcctagcaagcttgccatgaatccctcatcttgttgattgttctgagagacacgtttttggcgcggcctttcctaacatgcagtagactgaagtccagatttaaggtggagactggagcagagagctaactgcagagaacaggagggaatcatttgtgtgtgttgacagttcacctgggcatgcacttagcacgtattgtagagttcagtttcaaacatgcaacattagcactttatgcgattaaatgtagaattccacggagagggccattcagcaaagccttgatttgacttagccgttgtagttgagcatcagtgtcctctggaaaggtcatgtcccacagtggtcagtgctatcagacctcccagaattcacatgctggttccacttcatgagcagagagctgggttagtcatctgaactttcctctttgcatatctgtctgtacagtggacatggtaagtctgtcctgtgggcttttaagagggtatgggagttacatgccacacgggttgcaaatacgaaacggtgtgtccttgctaaaacctggagcatagagggtgctgtgtaatttattttttctgtttctgttataataatataatctgaaatctccagacccaccatttttctaagtaacttgtgttttccttgagggatttagaaggactgagtgtacctcactggttctgctagctggggggtgacggggctgatgcgctccttcaagctccagagttctctgtacgtgggcttctctgtcctgggcttctagatcgccctaggaaagcactgactcccaagatgaggttaaatgtatgctacgtgtctccccctacctcccaaatatataacttaagaacagtatgtatttggaatatgagctgtgttagcccctcaggtacatggtggaattgggtgacctgctgccttctgggtaggagagactgccattagtgacaagtttgtccaatcttggttttttttaaaaactttctccttcaccaaactgactgacggcgctgccaatgcctggattgctctgaacgcttgcttgcctttcgcttccttcgctttggtttcccatcaaagcgttttaagcggaaatgcgagcatttcagattgcttcttcaattgtcacctttgtttcttaagggttgagagtttggggaggaaagctgatgaagaaggaagacaaggaatacactcaggtatttgccatcaggtttgccgccttcctgctttactctagtgtgttggtgggactgcatcccagcgccagagagcccggaggccggtgtgctctgtgatgggatgacctcctcctctgcccttacccctcctgtgtgaagataaactgagaagtgtttcttccacctcctggctcttgtctgctatttcttcatcatagtccacagcaagccatgtgtaccgatgctggaccagcttggggactctcagggaatgtcctagagggagctccttagttgggtccttaccaaaaacgcccaaatctcatttcctttaagaaaaaaaaaaaaaaa

SEQ ID NO: 194 - DNA, 4749 bp, Mus musculus
atagccgaatatctccgattatgggtatgccagattcgagggcttccgaagagattcgattcaaagccccggcaagccgaaaacaaccgagcctgaaagccagatggggaggggccagccgctaggtagatggaaaaagccgattggtaccgatgtggggacggaaacgaccgaacagctccggagaaacccggggaattctgagcggtaatagaggggtagactatggcagtgggcggggccaatccggtccgttcgaagggcgttggcggaaattaccgaagatgcccgaagccgtcgggacggacccgagtacctcacgcaagatggcggagctggaggaggtgactctggacgggaagcctcttcaggctctgcgggtgaccgacctgaaggccgcactggagcagcgaggcctagccaagagcgggcagaagagtgccctggtcaagcggctcaaaggggctctaatgctagaaaaatttacaaaacactcaacaccccatgctgcattccagccaaattcacagatcggggaggagatgagccagaacagcttcataaagcagtacctggaaaagcagcaggagctgctgaggcagcgcctggaacgggaagctcgggaggctgcggagctggaagaagcctcagctgagtcggaggacgagatgacccatcctgagggagtggcttccctgctgcctcctgattttcagagcagcctgaacagaccagagctggagctcagcacacattcaccccgaaagagctcctctttttctgaagaaaaaggggaatctgatgatgagaagccgaggaaaggggaaagacgatcatccagagttagacaggcaaaatctaaactccctgagtacagtcaggctgctgaggaggaagaggatcaagagacaccatctagaaacctgagggtcagagcagatcgaaatttaaaaatagaggaggaggaagaagaagaggaagaagaagaagatgacgatgatgaagaggaagaggaggtagatgaggcacagaaatctagagaggctgaggcaccaaccctgaagcagtttgaggatgaagaaggggaagagaggaccagagcaaaaccagaaaaggtggtggatgagaaacccctaaacatcagatcccaggaaaagggtgagttagagaaaggagggcgagttactagatcccaagaagaagctagaagaagtcatctggccagacagcaacaagagaaagagacacaaattgtttctctccctcaagaagaaaatgaggtaaagtcttcacaaagtttggaggaaaaatcccagtctccctccccacctccgcttcctgaagacctagagaaggcccctgttgtgctgcagccagaacagatagtcagtgaagaggaaacacccccacctttacttaccaaggaagcgtcatctccaccaactcatatacaactccaggaagagatggagccagtggaaggcccagcaccccctgtcctcattcagttgtctcctcctaacacagatgctggagccagggagccactagcgtctcctcaccctgcgcagctgctaagaagcctgtctcctttgtcaggtactacagacaccaaagcagagtctccagcagggagagtgtcagatgagagtgtcctgcctctggctcagaaaagctcactgcctgaatgctccgcccagaagggtgttgaaagtgagcgtgaaaagtctgctcccctccctctaacagtggaggagttggcacccgccaaaggcatcactgaggaacctatgaagaaacagtctttggaacagaaggaggacagaagagcctcccacgctctcttcccagagtacagtgggaagcagtcagccgactcatcctctagcaggtcctcctccccttcatcctccagctctccatccagatctccatctcctgacagtgcggcttcccgcccacagtcgtctccaggatctaagcagagagatggagcccaagcacgagttcatgccaaccctcacgagagacccaagatgggttccaggtcaacttcagagtccaggtcacgttcccgatctcgttcccgttccgcgtcaagcagcagcagaaaatctctgagccctggagtctccagagatagcaacaccagctacactgaaaccaaagatccctcttgtggtcaggaggctgcagctccatctgggccacagctgcaggtccttgaaccaaaggagaaggctcccacgttctcagcgtctgtccgggggaggcatctgagccatcctgagccagagcaacagcacgtgatccagaggttgcagccggagcaggggatcccaaagaagtgtgaagctgaagaggcagagccaccagctgccacacagcctcaaacctcagagactcagatctctcatctgccagaatcagaaaggactcatcacactgttgaagagaaggaggaagtgaccatggacaccagtgaaaacagacctgaaaatgaggtgcctgagcctcctctgcctgttgcagaccaagtcagcaatgatgagcgcccagagggcggtgctgaagaagaggaaaagaaagagagttcgatgcccaagtcattcaagaggaaaatctccgttgtctcagctaccaagggggtgcaagctggaaacagtgacacagaggggggccagcctggccgaaaacgccgttggggagccagcactgccgcgacacagaagaaaccgtccatcagtatcaccactgagtcactcaagagcctcatccccgacatcaaacccctggcggggcaggaggctgttgtggatcttcatgccgatgactcccaaatctctgaggatgagacagagcgtaatggcgacgatgggacccatgacaagggactgaagatatgccggacagtcactcaggtagtacccgcagagggccaggagaatgggcagagggaagaggaagaagagaaagagcctgaagccgagctgccggcgccaccccaggtgtcagtggaggttgccttgcccccacctgtggagcacgaagtaaagaaagtaacattaggagataccttaacccggaggtccatcagccaacagaagtctggagtttccattacaattgatgacccagtccggaccgcccaggtgccctccccacccaggggcaagatcagtaacattgtccacatctccaacctggttcgtcccttcactttaggccagctgaaggaattattggggcgtacaggaactttggtggaagaggccttctggatagacaagatcaaatctcattgctttgtgacgtactctacagtagaggaagccgttgccacccgcacagctctgcacggggtcaagtggccccagtccaaccccaaattcctttgtgctgactatgctgagcaagatgagctggactatcaccggggactcttggtagatcggccatctgaaactaaggcagaggaacagggagcaccaaggcccctgcatcccccacccccacccccagtccagccaccgccccacccccgggctgagcagcgggagcaggaaagggctgttcgagagcaatgggcagaacgggaacgggaaatggagcgccgggagaggactcggtctgagagagaatgggatcgggacaaagttcgagagggaccccgctcccgatcacggtcccgtgaccgccgccggaaagagcgagcaaaatctaaagaaaagaagagtgaaaagaaagagaaagcccaggaggagccacctgccaagctgctggatgacctcttccgtaagactaaggcagctccctgcatctattggctccctctgactgagagccaaattgttcagaaggaggcagagcaagctgaacgggccaaggagcgggagaagcggcgaaaggaacgagaagaagaagaacaaaaggaacgggagaaggaagcagagcgggaacggaaccggcagctagaacgggagaagaggagggagcacagcagggagagagagagggacagggagagagagcgggacaggggtgaccgagagcgggagagggagcgagaccgagaccgaggcagggagagggatcgcagagacaccaagcgccacagcagaagccggagtcgaagcacacctgtacgggaccggggtgggcgccgctagccaagaaaacactagagagctgcaggtacctgccacttggtcctgggaggtcaaaggccacagagggataggtacagtcaccaccaccctggaaccaagggtctcacaacattgctcagtgctgaactataactgccacacgtcccctcatatcaaatgaagcagtggcaatctccctgttccccaacctaactcttggaacttggccctctcctttcttcctgttaagtctgagagggaagagctaggctatgaagggaagatgtggccgtacgtgggaataaccagtgtcccacgctcattttccctccatcctgcgttccgcctcccttggtactcagccttttggggacagctggggccaggactgggtcacctatgagctgaatcagcctctcctgagtcccaggcccctgcagtcccctggttctctggcctgcagcctcttgcccgctggttccactttatagccaccttttccttttgttcaatttttatttttattttttttattattaaatgatgtggtctatggaaaaataaaaatctgacttagttttgaaaaaaaaaaaaaaaaaaa

SEQ ID NO: 195 - DNA, 3761 bp, Mus musculus
atggggggcggccgggcacgtacgcgtccgggcggtcaccggggtcttgggggggggccgaggggtaagaaagtcggctcggcgggcgggaggagctgtggtttggagggcgtcccggccccgcggccgtggcggtgtcttgcgcggtcttggagagggctgctcttgggggctcgtccggccctgtcgtccttcgggaaggcgcgtgttggggcctgccggagtgccgaggtgggtaccctggcggtgggattaaccccgcgcgcgtgtcccggtgtggcggtgggggctccggtcgatgtctacctccctctccccgaggtctcaggccttctccgcgcgggctctcggccctcccctcgttcctccctctcgcggggttcaagtcgctcgtcgacctcccctcctccgtccttccatctctcgcgcaatggcgccgcccgagttcacggtgggttcgtcctccgcctccgcttctcgccgggggctggccgctgtccggtctctcctgcccgacccccgctggcgtggtcttctctcgccggcttcgcggactcctggcttcgcccggagggtcagggggcttcccggttccccgacgttgcgcctcgctgctgtgtgcttgggggggggggccgctgcggcctccgcccgcccgtgagcccctgccgcacccgccggtgtgcggtttagcgccgcggtcagttgggccctggcgttgtgtcgcgtcgggagcgtgtccgcctcgcggcggctagacgcgggtgtcgccgggctccgacgggtggcctatccagggctcgcccccgccgtcccccgcctgcccgtcccggtggtggtcgttggtgtggggagtgaatggtgctaccggtcattccctcccgcgtggtttgactgtctcgccggtgtcgcgcttctctttccgccaacccccacgccaacccaccgccctgtgctccgcgcccggtgcggtcgacgttccggctctcccgatgccgaggggttcgggatttgtgccggggacggaggggagagcggataagagaggtgtcggagagctgtcccggggcaacgctcgggttggctttgccgcgtgcgtgtgctcgcggacgggttttgtcggaccccgacagggtcggtctggccgcatgcactctcccgttccgcgcgagcgcccgcccggctcacccccggtttgtcctcccgcgaggctctccgccgccgcctcctcctctctcgcgctctctgtcccgcctggtcctgtcccacccccgacggcttcgctcgcgctcccttacctggttgatcctgccagtagcatatgcttgtctcaaagattaagccatgcatgtctaagtacgcacggccggtacagtgaaactgcgaatggctcattaaatcagttatggttcctttggtcgctcgctcctctcctacttggataactgtggtaattctagagctaatacatgcccacgggcgctgaccccccttcccggggggggggggggatgcgtgcatttatcagatcaaaaccaacccggtgagctccctcccggctccggccgggggtcgggcgccggcggctttggtgactctagataacctcgggccgatcgcacgcccccgtggcggcgacgacccattcgaacgtctgccctatcaactttcgatggtagtcgccgtgcctaccatggtgaccacgggtgacggggaatcagggttcgattccggagagggagcctgagaaacggctaccacatccaaggaaggcagcaggcgcgcaaattacccactcccgacccggggaggtagtgacgaaaaataacaatacaggactctttcgaggccctgtaattggaatgagtccactttaaatcctttaacgaggatccattggagggcaagtctggtgccagcagccgcggtaattccagctccaatagcgtatattaaagttgctgcagttaaaaagctcgtagttggatcttgggagcgggcgggcggtccgccgcgaggcgagtcaccgcccgtccccgccccttgcctctcggcgccccctcgatgctcttagctgagtgtcccgcggggcccgaagcgtttactttgaaaaaattagagtgttcaaagcaggcccgagccgcctggataccgcagctaggaataatggaataggaccgcggttctattttgttggttttaacggaactgaggccatgattaagagggacggccgggggcattcgtattgcgccgctagaggtgaaattcttggaccggcgcaagacggaccagagcgaaagcatttgccaagaatgttttcattaatcaagaacgaaagtcggagtttcgaagacgatcagataccgttgtagttccaaccataaacgatgccgactggcaatgcggcggcgttattcccatgacccgccgggcagcttccgggaaaccaaagtctttgggttccggggggagtatggttgcaaagctgaaacttaaaggaattgacggaagggcaccaccaggagtggagcctgcggcttaatttgactcaacacgggaaacctcacccggcccggacacggacaggattgacagattgatagctctttctcgattccgtgggtggtggtgcatggccgttcttagttggtggagcgatttgtctggttaattccgataacgaacgagactctggcatgctaactagttacgcgacccccgagcggtcggcgtcccccaacttcttagagggacaagtggcgttcagccacccgagattgagcaataacaggtctgtgatgcccttagatgtccggggctgcacgcgcgctacactgactggctcagcgtgtgcctaccctacgccggcaggcgcgggtaacccgttgaaccccattcgtgatggggatcggggattgcaattattccccatgaacgaggaattcccagtaagtgcgggccataagcttgcgttgattaagtccctgccctttgtacacaccgcccgtcgctactaccgattggatggtttagtgaggcccacggccctggtggagcgctgagaagacggtcgaacttgactatctagaggaagtaaaagtcgtaacaaggtttccgtaggtgaacctgcggaaggatcattaacgggagactgtggaggagcggcggcgtggctcgctctccccggtcttgtgtgtgtcctcgccgggaggcgcgtgcgtcccgggtcccgtcgcccgcgtgtggagcgaggtgtctggagtgaggtgagagaaggggtgggtggggtcggtctgggtccgtctgggaccgcctccgatttccccttcctccccctcccctctccctcgtccggctctgacctcgccaccctaccgcggcggcggctgctcgcgggcgtcgtgcctctttcccgtccggctcttccgtgtctacgaggggcggtacgtcgttacgggtttttgacccgtcccgggggcgttcggtcgtcggggcgcgcgctttgctctcccggcacccatccccgccgcggctctggcttttctacgttggctggggcggttgtcgcgtgtggggggatgtgagtgtcgcgtgtgggttcgcccgtcccgatgccacgcttttctggcctcgcgtgtcctccccgctcctgtcccgggtacctagctgtcgcgttccggcgcggaggtttaaagaccccgggggggtcgccctgccgcccccagggtcggggggcggtggggcccgtagggaagtcg

SEQ ID NO: 196 - DNA, 1241 bp, Mus musculus
ggccgtgaggacggggtgcgcgctcagctgcaggaaatgaagaagcgcgcggaaaacatgacgcagcgggtgcaggagctccagccctacaaggccagtgcgcgcgccccccgaggaccgggcgggctccagagggatgggcgcgctccctaccggtgcgctgatcggcgccccctgctccccaaccctcaccccaccccatgtaggagctgcagctggagcagctggcgcgaatccggaccctggagcgcgagctgctgcacatgcgcgtggagcacacgcagctcctccacggggtgaagcgacgcttcctagatgagaagacggctttcgagcgggaggcgcggctgcaagtgcagtccctgacgcgccgctccgagcgggaggccgcacgttccctcatttcccacgcacaggccctcaaggcggacaacgggtatctccgacaagaactcatgagacttctccagaggacccagttactgcaggacatgcgacagcagctgctagagcagcgggagcagctgcgccgggagcatgtggacttgaagaacctggagcaaatgcacggctggttgcaaaggggccccggggggccaccgctctggcagccaccccaaagcctccaacccagcttgcgcatcgggtcaaccagtcacgttttaaaagcccaggctacgccccagtcagttccaacctcccggggccaatccatggatctgtcacaccgaccctccaagactccatctatattgtccagtgagtctcttccgggcctatctcagaaggctgggtcagtgattgctctccggagtccatcacatccaggatctcgagtctcatctctgactccatcacgcaaggactcgcgtgtctcatccgcgaccccgtcacgcaagggctccagggttccatccatgacctctggtaccttgcggtcgcgcgagggctctcggatctctccacagccctccttgcgtgaggtctctccagaaattgacacacctgcaaagtccagttccaagcttcccacagccctgttggaagatcaggcccctctcagcccacagttggaggaggcagaaaacgctgaagacgacacagaaactgtcttggagcaagcctgaacccacacgaggaggcaggccagtagggcatagggtggaggacaaaccttggaagatttcttggtgcatagatatgttaataaaagtgttaaataaaaaaaaaaaaaaaaaaaa

SEQ ID NO: 197 - DNA, 551 bp, Mus musculus
gaattccctgatccttgttacggtccagatcatccatcagccttgcaatttcagcatcctgcagcttggagccaatggtgagctccttctggatcccctcgaccactcctttggcgcttcgctgtcgaccgtgcgcttcttctagcccagtgatcagtcatggcatgccctctggatcaggccattggccttctcgtggccatcttccacaagtactctggcaaggaaggtgacaagcacaccctgagcaagaaggagctgaaggagttgatccagaaggagctcaccattggctccaagctgcaggatgctgaaattgcaaggctgatggatgatctggaccgtaacaaggatcaggaagtaaacttccaggagtatgtcgccttcctgggggccttggctttgatctacaatgaagctctgaaataaaatgggaccgttgagatgacttccgggggcctctctcggtcaaatccagtggtgggtagttatacaataaatatttcgtttttgttatgcctaaaaaaaaaaaaaaaaaaaaaaaggaattc

SEQ ID NO: 198 - DNA, 1752 bp, Mus musculus
ggttttccagtcggacccctagagtcggggcctttggggctggctgggttgagaatcctgcggtccggtgttggtggcggtgacttgttgccaccctgcagccgcacaccctcgagccatgtcctgggctgctctgctcggcctcctggccgtgctattgctgttgctgctgctgctgagccgccggcgcgcgcggagacctggtgagcctccgttggacctgggcagcatcccctggctgggccatgccttggagtttgggagagatgctgccagcttccttaccaggatgaaggaaaagcacggtgacatatttactgtgctggtggggggcagatacgtcactgttctcctggacccacactcttacgacacagtggtgtgggagctgcgtacacggctggacttccatccctatgccatcttcctcatggagaggatttttgatctgcagcttccaaatttcaaccccagtgaggagaaggccaggatgaagccgacgctcatgcacagagacctgcaggcgctcacagaagccatgtataccaaccttcgcacggtcctgctgggtgactccacagaagcaggcagtggctggcaggagacaggtctccttgagttctcctacaacgccctgctcagcgccggctacctgaccctatatggagtggaggcctcaccacgcacccatgagagtcaggcccaagatcgtgtccactcagcggatgttttccataccttccgccagctggatctgctgctccccaaactggctcgaggctccttgtcagcgggggataaagaccatgcatgcagtgtcaaaaaccgcctgtggaagctgctgtccccagccaggctggcctccagggctgaccggagcagctggctggagagttatctgagacatcttgaggagatgggggtgtcagaggagatgcaggcccgggctctggtgttgcagctctgggccacacaggggaatatgggtcccacggccttctggctccttcttttcctcctcaagaatccggaagccctcgccgctgtccgtgcagagctgaagcacacggtctggcaagcagagcagcctgtttcacagatgaccacactcccacagaagattctagacagcatgcctgtgctagacagtgtgctcaatgagacactccggctcacggctgcccccttcatcacccgtgaggtcatggcagacctggccttgcctatggcagacgggagggaattctctcttcgacgtggtgaccgccttctcctctttcccttcctgagtccccagaaggacccagaaatctacacagagcctgaggtgtttaaatacaaccgattcttgaacccagatggatctgaaaagaaagatttttacaaagatgggaaacggctgaagaattacaacatgccatggggcgcagggcacaaccagtgcctggggaagagttatgccatcaacagcatcaaacaatttgtcgtcctactgctgactcatttcgacctggagctgggcagcgaggacacagaggttcctgagtttgacctcagcagatatggcttcggtctgatgcagccagaggaagacgtgcccatccggtaccgtgccaggctgtgacctatggagcagactcacctggggccttctgacttcctgttgttcctctagaatgctatgtccagcggaggggacactgaggacagtgagagcaggaaaagctaataaaagctctgtatctcgctgtg

SEQ ID NO: 199 - DNA, 1972 bp, Mus musculus
gcacgagcaaaagctcttcttggtgaccagtcatcctacttttcattttttttcagactggagatttaatagcataaagtcaaaacatttttttttctttttgttatcccccatcaacttattttagctaacctaacaccagccacaggactcaacggtatattcctggaaagcaaggtgctgtaatggcaaccccaaactgtttaatactctgggtgttactcatagcagatactgtgtggacacagagtgtgagacaggcctatgaaatacaggacccagaggactgggatgtccacgacgacttctattgtcccagagaatgcttctgtcctcccagtttccctactgccttatactgtgagaacagaggtctcacagaaatccctcctattccttcaaggatctggtacctctacctggaaaacaacctgattgaatccataccagagaagccctttgagaatgccacccagctgagatggatcaatttaaacaagaacaaaataaccaactacgggattgagaagggggccctgagccagctaaagaaacttcttttcctgtttcttgaagacaatgagctagaggaggtaccttctccattgccaagaagtttggaacaattacaattagctagaaacaaagtatccagaatccctcaggggaccttcagtaatctggaaaacctgacccttcttgatctgcagcataacaaactattagacaacgcctttcaaagagatactttcaagggccttaagaacctcatgcagttaaatatggcgaagaatgccctgaggaacatgcccccaagattaccagccaacaccatgcaactctttctagacaacaactccattgaaggaatacctgaaaattatttcaatgtgattcctaaggtggctttcctgaggctcaaccacaacaaactatcagatgcaggtctcccgtcgaggggttttgatgtgtcatccattctggatcttcaactgtcttacaaccagctcacaaactttccccgaatcaatgctaacctgcagcaccttcaccttgatcacaacaaaattaaaaatgtgaacatgtctgtaatatgtcccaccacactgcgtgcagaacaggatgccttcattcacggaccacaactgagctacctgcgtctggatgggaatgaaatcaagccaccgatcccgatagatttggtggcttgcttcaagcttcttcaggctttcataatataagacagaacccaaactggtttaagggtagatgtatgtggtatgagattttgattgttacttctaggtcctagaccacacttgcaattgttcttacccaccattttcatatgtgcagcttgttctttctgtttgaggatgctctggtcagtgacacacaggggccacgtgtattagtttgctttcttctgattaacaaaacagacacagagttgaaaaagctcctcaactcaaaggtatttttatctccttgcagctactaatagccaatgttttttttttttactgttacacattcaaaataatttacttgcatatgaccaaatttatgagtactggtagtgcagactccccataagcaccacaatgagctagcaggaggaagctctgaaaataggaataaatgaaatattcctctgtcatcattataatgagcccactagtcaaaagctttctaaaaagagacacctggttattagaatgaaacaataaagcaagagagagaggttcaggtcccttggagcgaaacaataaagcagtaaaaggtggtggttcactatcatttcttacatatcttttcttagatcttatatattatctccagtaactgattccttaaatattgcagttattataacatagcatgcaaactatccagctcttattttgattatgatttgggggatttttctaaataaaactattgaatattttctaaaaaaaaaaaaaaaaaa

SEQ ID NO: 200 - DNA, 1972 bp, Mus musculus; identical to SEQ ID NO: 199

SEQ ID NO: 201 - DNA, 1094 bp, Mus musculus
ggcacgagcggcaaggagggagcagcagcagcggcggcggcggcggcggcggcggcggaggcgcccggtcccggccgcgcggagcggacatgtgcaggctgggctaggagccgccgcctccccccccgccccgcgatgtattcagcgccctccgcctgcacttgcctgtgtttacactttctactgctgtgcttccaggttcaggtgttggcagccgaggagaatgtggacttccgcatccacgtggagaaccagacgcgggctcgagatgatgtgagtcggaagcagctgcgcttgtaccagctctatagcaggaccagtgggaagcacattcaagtcctgggccgtaggatcagtgcccgtggcgaggacggggacaagtatgcccagctcctagtggagacagataccttcgggagtcaagtccggatcaagggcaaggagacagaattctacctgtgtatgaaccgaaaaggcaagctcgtggggaagcctgatggtactagcaaggagtgcgtgttcattgagaaggttctggaaaacaactacacggccctgatgtctgccaagtactctggttggtatgtgggcttcaccaagaaggggcggcctcgcaagggtcccaagacccgcgagaaccagcaagatgtacacttcatgaagcgttaccccaagggacaggccgagctgcagaagcccttcaaatacaccacagtcaccaagcgatcccggcggatccgccccactcaccccggctaggtccggccacactcacccccccagagaactacatcagaggaatatttttacatgaaaaataaggaagaatctctatttttgtacattgtgtttaaaagaagacaaaaactgaacctaaagtcttgggaggaggggcgataggattccactgttgacctgaaccccatgacaaaggactcacacaaggggaccgctgtcaacccacaggtgcttgcctctctctaggaggtgacaattcaaaactcatccccagaggaggacttgaacgaggaaactgcgagaaaccaaagtcctttccccccaaaggttctgaaagcaaacaaaacaaaaacaaa

SEQ ID NO: 202 - DNA, 4546 bp, Mus musculus
gcgggtccctgtccgtgcggtgcagcaggtcggtaggcgggaaatggcgactggctgaaggagctggttctgttgctgctgagggataagcgggaaagacaccacctattgcgcagtcgggaccatcgccggagcccgaagacacttttctgtcgtcacagtgaaggtttacatgtggcacccgtaaaagatgaagctgagaacacggaaggcttctcagcagtccagtccaatccagacacagcgcactgccagagcaaagaggaaatactcagaggttgatgatagcttgccttcaggaggagaaaaaccatcaaagaatgaaaccggcttattgtcttcaattaaaaagttcattaaaggaagcacacccaaggaagagagagaaaatccttcgaagcggagtagaattgaacgtgatatagataataatttaatcacatcaacaccaagaaccggagaaaagcctgacaaacagttgtctcgagtaagacggaaaagtccagtcaatggagaagctggtagttatgaaatgacaaatcaacatataaagcaaaatggaaaattagaagataacccttgctctggtagtcctccgaggactacattgttggggaccatattttcgcctgtcttcaactttttttcaccagcaaataaaaatggaacgtcaggctcagattccccaggacaggctgtggaagctgaggagatagtgaaacaacttgacatggaacaggtggatgaaattactaccagcaccacgtcagctaatggagcggcttactcaaatcaagcagttcaagtgaggccatcactaaataatggtttagaagaagcagaagaaacagttacccgggatatcccaccccttacagcaccagtaactccagagagtgggtactcgtcagcccatgcagaggccacctatgaagaagactgggaagtatttgacccctattatttcatcaaacatgttccgcctctgacagaagaacagctaaataggaaacctgctcttcctttgaaaacaagaagcacaccagagttctccctggtcttagatctggatgagacactagtgcactgcagtctgaatgagctagaagatgcagcgctcacttttccagtccttttccaagatgtcatttatcaggtttatgtgagattaagaccattcttcagggaattcctggaacgaatgtctcagatgtatgagatcattctttttactgcttctaagaaggtgtatgcagacaagttactgaacatactagaccctaaaaagcaactggtcaggcaccggcttttccgtgaacattgtgtttgtgtacaaggaaactatataaaggacttgaatatccttgggagagatctttccaaaactataataattgacaactcaccacaagcctttgcctatcagctttctaatggaatccctatagaaagctggtttatggataaaaatgacaatgaactcctaaaattgattccatttctggagaagcttgtagaactgaatgaagatgtccggcctcacatcagagacagatttcgattgcatgatttgctgcccccagattaagttcagagacttgtcatatcactgaagggggggagagaatgcaggacccttttggactaagacaaaaacattgccattactgttgaaattttgcatttttgtaccccgtcttgctttcttatctttggtgcccaataataatcaagggttacagaaagagactctcggattgaacacatacagtgggtaggctaaaacagaagcgtctgtagagtagacagctccagtgagactctatgtataggacatctgcagctcataacgaattctgtttctgccaccagcagtttgacctgtagttacacaggattttatgataataacagagatgaaagtggactttcattctctctctgtttggtgctctcagtgggtttgtagccactcttctgttacttcactattctcatttcaacaggaatggccagtaaaagttgttttatttttcctgttaaggtttataacctttttacatttctgacctgtattagattagaatctcatgatgcattccttttagttaaggcgcttcatagttttctggaaatagtcaatttttagttttttttttaattatacatttgaatggccgttttcctgctttgtctgcctgcatattgtatatttgtttaaaaatattctctacttttagtccatgttaagtttcatttaaaagatgcatttatattttgttctgtaatattctactgtaggtgaaatcttcaaaaatcaagagactgggtagttaagaatatatgaatgactaatattcaaatgatttgaatgaaccattgtgatgacatgtattccagatggtaatatcttgcaatggcacacgtttaatggataaaggtatacctcagacttcactgtgctcactagcctttgaggagaacgagttcaggcacctgttgggcttgattcggttactgctgcctttgggttttctccaggaaggaagtattcagcacagtgactcagtatttttactttgcatgggctggtagtacctctgttatgctcccagttacaatcagtttaaagctctgtgtaacagctgtggtacctaacggtggctatgcataatcctgtggcacagtacactcccgggccaccagtgcagtcaatgtgctcatagtggttttctatgctatatgaaaataagtcgtcacgccttggttctctaatgcagctaccacaagaggttgatatttttatagtggcgtgtaatctccttttcaggaggctttttatggaaggtagaatttgtaaaagtcagtatgctttgcctctcaactgcattaacatgccgcaggctcagactgtttttgtgtaaaggatgtcaaagaacggcactttttctaaagagaagtttgatattttgtatgcttgttaagaaagtacagtattggaaattaaaggtggacaattgataattgaggagtatgtcagttaattttttatgtatattacctgtttacttgtacaacttattgtacaaattacatgcagcttcattttcaaatgaatccttaaaataaggaaatctttttaggaaaacatttaatttttgtatttttgattttaaaggcatgagttgtcagttttcagtgtattaatgaagattttaacttttcatcaggttgagtgttttcttactatattatctgttgtgtatgtagttagcatattgtgtcactgaactgtttaaaaatctagcatgtagagcaagcctgttttgtggaaaatccttattcattaaaaaaaataatcatggcagattttctgcaaaaaaaaaaaaagcaaaagcatttgcaattcagattttttttatttaaaaaaaaaaggtattttgcttgcaggaacaatactacagattcattttaatgagaatcttcgaaatgtatttatctttagggcacctgggcatctttatgctgtttgtcttatgtctttcttgaaataaaatgtaaatatgttacctttacatatgctctttctcaaaattgtgaacctagttaatatcttcttgcccccatcatttttatgcttatacagcaaaccccaaaacctgtacaagattgaatttttgacaaacataattgttgacaatgtacttgatcaggaattaagtaaatacagtctcaaagcccttcccacatcttaaaaggggaaacacttataccatagtgcctgtgggcactttaataataaaaaagcaggcctgtgccaggggaatgagctcctactcagccagtaggtgagtcaacaatacacttttgtagagaaatgtaacgtgggaaagtttacatggcctgagagttgagaccaaattaatagattatttttttctattactttgagtaattctaaagttgttgataacaaagtttaaagaagattataaagaagtttgctggcttcttttcattttaataggtttatctttcaatcatatcttttctttgttggtaactgtagaacgcttccttttagttaatcagaggtgtgtacttttttaattgcaatgtgcccagcctgtcagtgcacacagcacacatgactatagtaaatgcaggggccatgggtccatgaagcacacagcaagctacctgtgtacacattacaactcttaaggacctattaaaattgtgctatttccagttatgaatgtttgacttttaagacattcttttaaatatttgtatcattgttagagaatatttgcttggttgtattttttagacccatgtaatatatgtagtcctgaccagatttattaccatttttctctgggtcctaaaagagatcgatgacaattcgtaaccagaaattgttttatatttgctagtatgtatatttatttatccaatggctttatttgtttcccaaaattgttttgggacttgttgaaagcattgtgtaacttctataaatggctattttcttgtaactgcc

SEQ ID NO: 203 - DNA, 2334 bp, Mus musculus
gctcttctctccaagaagactcagccagatccactccagctccgaccccaggagaccgacctcctccagacggcagcagccccagcccagccgacaaccccagacgccaccgcctggagcgtccagacaccaacctccgcccctgtccgaatccaggctccagccgcgcctctcgtcgcctctgcaccctgctgtgcatcctcctaccgcgtcccgatcatgctcgcctccgtcgcaggtcccatcagcctcgccttggtgctcctcgccctctgcacccggcctgctacgggccaggactgcagcgcgcaatgtcagtgcgcagccgaagcagcgccgcactgccccgccggcgtgagcctggtgctggacggctgcggctgctgccgcgtctgcgccaagcagctgggagaactgtgtacggagcgtgacccctgcgacccacacaagggcctcttctgcgatttcggctcccccgccaaccgcaagattggagtgtgcactgccaaagatggtgcaccctgtgtcttcggtgggtcggtgtaccgcagcggtgagtccttccaaagcagctgcaaataccaatgcacttgcctggatggggccgtgggctgcgtgcccctatgcagcatggacgtgcgcctgcccagccctgactgccccttcccgagaagggtcaagctgcctgggaaatgctgcaaggagtgggtgtgtgacgagcccaaggaccgcacagcagttggccctgccctagctgcctaccgactggaagacacatttggcccagacccaactatgatgcgagccaactgcctggtccagaccacagagtggagcgcctgttctaagacctgtggaatgggcatctccacccgagttaccaatgacaataccttctgcagactggagaagcagagccgcctctgcatggtcaggccctgcgaagctgacctggaggaaaacattaagaagggcaaaaagtgcatccggacacctaaaatcgccaagcctgtcaagtttgagctttctggctgcaccagtgtgaagacatacagggctaagttctgcggggtgtgcacagacggccgctgctgcacaccgcacagaaccaccactctgccagtggagttcaaatgccccgatggcgagatcatgaaaaagaatatgatgttcatcaagacctgtgcctgccattacaactgtcctggggacaatgacatctttgagtccctgtactacaggaagatgtacggagacatggcgtaaagccaggaagtaagggacacgaactcattagactataacttgaactgagttgcatctcattttcttctgtaaaaacaattacagtagcacattaatttaaatctgtgtttttaactaccgtgggaggaactatcccaccaaagtgagaacgttatgtcatggccatacaagtagtctgtcaacctcagacactggtttcgagacagtttacacttgacagttgttcattagcgcacagtgccagaacgcacactgaggtgagtctcctggaacagtggagatgccaggagaaagaaagacaggtactagctgaggttattttaaaagcagcagtgtgcctactttttggagtgtaaccggggagggaaattatagcatgcttgcagacagacctgctctagcgagagctgagcatgtgtcctccactagatgaggctgagtccagctgttctttaagaacagcagtttcagcctctgaccattctgattccagtgacacttgtcaggagtcagagccttgtctgttagactggacagcttgtggcaagtaagtttgcctgtaacaagccagatttttattgatattgtaaatattgtggatatatatatatatatatatatttgtacagttatctaagttaatttaaagtcatttgtttttgttttaagtgcttttgggattttaaactgatagcctcaaactccaaacaccataggtaggacacgaagcttatctgtgattcaaaacaaaggagatactgcagtgggaattgtgacctgagtgactctctgtcagaacaaacaaatgctgtgcaggtgataaagctatgtattggaagtcagatttctagtaggaaatgtggtcaaatccctgttggtgaacaaatggcctttattaagaaatggctggctcagggtaaggtccgattcctaccaggaagtgcttgctgcttctttgattatgactggtttggggtggggggcagtttatttgttgagagtgtgaccaaaagttacatgtttgcacctttctagttgaaaataaagtatatatatattttttatatg

SEQ ID NO: 204 - DNA, 1767 bp, Mus musculus
gactaatgttggggtaaacacagaaagcccattataacatgataagttcattaaaagaggtcagaatatcgtgcttcagatcacagaagcggtaacgagcagcaccctgctcagaggagaagtgaggggagacaggggcaggagacccagaatctcacgtaacctttaaacttcttcagaaggtcgtgaaaatacatgagataatcatgaaggcaactctcatcttcttccttctggcacaagtctcttgggctggaccatttgaacagagaggcttatttgacttcatgctagaagatgaggcttctggcataatcccttatgaccctgacaatcccctgatatctatgtgcccctaccgatgccagtgtcatcttcgagtggtgcagtgttctgatctgggtttggacaaagtgccctgggattttccacccgacacaaccttgctagacctgcaaaacaacaaaattacagagatcaaagaaggggccttcaagaacctgaaggacttgcataccttgatccttgtcaacaacaagatcagcaaaatcagtccagaggcattcaaacctctcgtgaagttggaaaggctttacctgtctaagaaccaactaaaggaactgcctgaaaaaatgcccagaactctccaggaacttcgtgtccatgagaatgagatcaccaagctgcggaaatccgacttcaatggactgaacaatgtgcttgtcatagaactgggcggcaacccactgaaaaactctgggattgaaaacggagccttccagggactgaagagtctctcatacattcgcatctcagacaccaacataactgcgatccctcaaggtctgcctacttctctcactgaagtgcatctagatggcaacaagatcaccaaggttgatgcacccagcctgaaaggactgattaatttgtctaaactgggattgagcttcaacagcatcaccgttatggagaatggcagtctggccaatgttcctcatctgagggaactccacttggacaacaacaaactcctcagggtgcctgctgggctggcacagcataagtatatccaggtcgtctaccttcacaacaacaacatctccgcagttgggcaaaatgacttctgccgagctggacacccctctcgaaaggcttcctactcggctgtgagtctttacggcaaccctgtccggtattgggaaatctttccaaacaccttcagatgtgtctatgtgcgttctgccattcaacttggaaactacaagtaaccctcagacggcctaattcttataatctggaaaaacaccccaatatgtcaatatcattgctaaaaagaaaaaatactaaaaaagaaagaaagaatgctagattctgaaaattcaagcacactgtgcatgccttttccacatgacttattatgcaagctgaatatacagattgaataattgcctacaataaaaatattttacttgtagtattcagaatcacttttaaagttgtctgtagttgtgaactgagttatcaaagtctgatgtaatcataaatgtcaaccacttagtaaagcgttaaaaggaacagaatacaaagtctctgtaattcatagagctaaattaactcttttgacataaagtcaaatgccgccgaactctagcaatgtattaatctcctttattattggtgaagccttatttgagtatgtaagttcaatatgggctatgtaaaattttcactgtcatattgaaaaaaataaaattttaaaaatgc

SEQ ID NO: 205 - DNA, 1438 bp, Mus musculus
cggtagagctgttgaatgtttgcagctggcccctcttaggcagttcagaattttgagtagttttcccatccagcctcttaaaaattcctaagccttgcaccgatgggctttcatgatgggatagctaataggcttttgcatcgtaaacttcaacacaaaagcctacatgattaatgcctactttaattacattgcttacaagattaaggaatctttatcttgaagaccccatgaaagggatcattatgtgctgaaaattagatgttcatattgctaaaatttaaatgtgctccaatgtacttgtgcttaaaatcattaaattatacaaattaataaaatacttcactagagaatgtatgtatttagaaggctgtctccttatttaaataaagtcttgtttgttgtctgtagttagtgtgggcaattttggggggatgttcttctctaatcttttcagaaacttgacttcgaacacttaagtggaccagatcaggatttgagccagaagaccgaaattaactttaaggcaggaaagacaaattttattctccatgcagtgatgagcatttaataattgcaggcctggcatagaggccgtctaactaaggactaagtaccttaggcaggtgggagatgatggtcagagtaaaaggtaactacatatttggtttccagaaagtcaggggtctaatttgaccatggctaaacatctagggtaagacacttttcccccacatttccaaatatgcatgtcgagtttaaatgcttacgatcatctcatccactttagcctttggtcacctcacttgagccacgagtggggtcaggcatgtgggtttaaagagtttccctttgcagagcctcatttcatccttcatggagctgctcaggactttgcatataagcgcttgcctctgtcttctgttctgctagtgagtgtgtgatgtgagaccttgcagtgagtttgtttttcctggaatgtggagggagggggggatggggcttacttgttctagctttttttttacagaccacacagaatgcaggtgtcttgacttcaggtcatgtctgttctttggcaagtaatatgtgcagtactgttccaatctgctgctattagaatgcattgtgacgcgactggagtatgattaaagaaagttgtgtttccccaagtgtttggagtagtggttgttggaggaaaagccatgagtaacaggctgagtgttgaggaaatggctctctgcagctttaagtaacccgtgtttgtgattggagccgagtccctttgctgtgctgccttaggtaaatgtttttgttcatttctggtgaggggggttgggagcactgaagcctttagtctcttccagattcaacttaaaatctgacaagaaataaatcagacaagcaacattcttgaagaaattttaactggcaaaag

SEQ ID NO: 206 - DNA, 7255 bp, Mus musculus
atggtggtgtcggaggaggaagaagaggaggaagaagagggcgacgaggaggaggaggaggtggaggcggccgacgaggacgatgaggaggaggacgaagagggagtactcgggcgcgggccgggccacgaccggagccgcgaccgccacagcccccccagctgccacctcttcccgccgccgccgccgccgcctcctcccctcccccgccgcacccctcctccgccgctaccgcggccgccgccaccgccgccgccgccgccgccgccgcataaagatgatattcggctgctgccttcagcgttgggtgtgaagaagcgaaaacgaggccctaagaagcagaaggaaaacaagccaggcaaacctaggaaacggaagaagctcgacagtgaagaggaatttggctcagagcgagatgagtaccgggagaagtcagagagtggaggcagcgagtatggaactggaccaggtcggaaacgaagaaggaagcaccgagaaaaaaaagagaaaaaaacaaaaaggaggaaaaggggagaaggggatgggggacacaagcaggtggagcagaagtcatccgcaaccttgcttctgacctggggcttagaggatgtggaacacgtgttctccgaggaggactaccacacacttaccaattacaaagctttcagtcagttcatgaggcccctaattgctaagaagaatcctaagatcccgatgtcaaagatgatgaccatcctgggggccaagtggagagagttcagtgccaataaccccttcaaagggtcggcagctgccgtggcggcggcagcggcagcagcagcagcagctgtggctgagcaggtgtcagctgctgtctcctcagccacccccatagcaccatctggacccccccctgcccttccaccaccccctgctcctgaaatccagcccccacccatcagaagagccaaaaccaaagagggcaaaggtccaggccacaagaggcggaataagagcccccgagtgcctgatggacgcaagaagcttcgagggaagaagatggcgccactgaaaatcaagctagggctgctgggtggcaagaggaagaaggcgggctcgtgtgcttttcagagtgaggagggccatgaaccagaggcagaggagtcagacctggacagtggtagtgtccatagtgcctcaggctggcctgatggccctgtccgtgccaagaagctgaagcgaggtcggccaggaaggaagaagaagaaggtcctgggctgtcctgcagtgaccggagaggaggaagttgacggctacgagacggatcaccaggattactgtgaggtgtgccagcagggcggggaaattattctgtgcgacacctgcccccgtgcctaccacctcgtctgccttgaccccgagcttgaccgggctcctgagggcaagtggagctgcccccactgtgagaaggagggggtgcagtgggaggccaaggaggaggaggaagagtatgaggaggaaggggaggagggagagaaggaggaagaggatgaccacatggagtactgccgagtgtgcaaggacggcggggagctcctgtgctgtgacgcttgcatctcctcctaccacatccattgtctgaaccccccactgcctgacattcccaatggcgaatggctgtgcccacgatgcacatgtcctgtgctgaagggccgtgttcagaagatcttgcattggcgatggggggagccacctgtggcagtgccagcaccgcagcaggcagacgggaacccagacgtcccaccccctcgtcctcttcaaggcagatcagagcgagagttctttgtcaagtgggtgggactgtcctactggcactgttcctgggccaaggagcttcagctggaaatcttccacttggtaatgtaccgaaactatcaacggaaaaatgacatggacgagcccccgccgctggactatggctctggtgaggatgatgggaagagtgacaagcgcaaggtgaaggacccgcactatgcggagatggaggagaagtactaccgtttcggcatcaagccggagtggatgactgtccaccgcatcattaaccatagtatggataaaaaggggaactaccactaccttgtgaaatggaaggatctgccttacgaccagtccacgtgggaggaggatgagatgaacatcccagagtacgacgaccataagcagagctactggagacaccgtgagctaattatgggcgaggaccccgcacagcctcgaaagtataagaagaagaagaaggagttacagggtgatgggcctcccagttcacctactaacgatccaacagtgaaatatgagactcagccaaggttcatcacagccacgggcggcacactgcacatgtatcagctggaagggctgaactggctgcgcttctcgtgggcccaaggcactgacacgatcctggcggatgagatggggctgggcaagaccatccaaaccatcgtctttctctactcactgtataaggagggccacacaaaaggtcccttcctggtgagtgctccactctccaccatcatcaactgggaacgggagttccagatgtgggcacccaagttctatgtggtcacatatacgggcgacaaggacagccgggccatcataagagaaaacgagttttcgtttgaggataatgccataaaaggcgggaagaaagctttcaagatgaagagagaggcacaggtgaagttccatgtccttctgacatcatacgagctgatcaccatcgatcaggcggcgcttggctccatccgctgggcctgtcttgtggtggatgaggctcatcgactcaagaacaaccagtccaagtttttcagggtcctcaatggctacaagatagatcataagttgttgctgacggggaccccgctgcagaacaacctggaggagctcttccaccttctcaacttcctcaccccagagaggttcaacaacttggagggcttcttggaggagtttgccgacatatccaaagaggaccagattaagaaactgcatgatttactggggccacatatgcttcggagactcaaggcggatgtctttaagaacatgccagccaagaccgagctcattgttcgagtggagctaagccccatgcagaagaaatactacaagtacatcctaactcgaaattttgaggccttgaattctcgaggtggtgggaaccaagtgtccctgcttaacatcatgatggaccttaagaagtgctgcaaccacccgtacctcttccccgtggctgctatggagtctcctaaactccccagtggggcttatgagggtggggcgcttattaagtcatcagggaagctgctgctgctgcagaagatgctgcgcaagctgaaggagcaaggacacagagtgctcatcttctcccagatgaccaaaatgttagaccttctggaggacttcctagactatgaaggctataagtatgagcgcatcgatggtggtatcacgggcgccctcaggcaggaggccattgatcgcttcaatgcccctggtgcccaacagttctgcttcctcctgtccacccgagctggtggcctgggcatcaacttggccactgctgacactgtcatcatcttcgattctgactggaacccccataatgacatccaggccttcagcagagcccatcggattggccaggccaacaaagtgatgatttaccggtttgtgacccgagcctctgtggaagaacgaatcacacaggtggctaagagaaagatgatgctgacacacctagtggtgcggccaggcctgggctccaaggctggctccatgtccaagcaggagctggacgacatcctcaaatttggcaccgaggagctattcaaagatgaaaatgagggagagaataaggaggaggatagcagtgtgatccactatgacaatgaagccatcgctcgactgctggaccgtaaccaggatgcgactgaggacacggatgtgcagaacatgaacgaatacctcagctccttcaaggtggcacagtatgtcgtgcgtgaagaagacaagattgaggagatcgagcgagagatcatcaagcaggaggagaatgtggatcctgactactgggagaagctactgagacatcactatgagcagcagcaagaagacctggcccgcaacctaggcaagggcaagcgggttagaaagcaggttaactacaacgatgccgcccaggaggatcaagacaaccagtcagagtactcagtggggtccgaggaagaggatgaagactttgatgagcgtcctgaaggccgtcgacagtcaaagaggcagcttcgaaatgagaaggacaagccactgcctccattgctggctcgggttgggggcaacattgaagtactgggattcaatactcgacaacggaaggccttccttaacgctgtgatgcgctgggggatgccaccccaggacgcgttcaccacacagtggctagtgagagacctgaggggcaaaacggagaaggagtttaaggcctatgtgtctttgttcatgcgccatctgtgtgagcctggggcagatggctccgaaacgtttgcggatggggtccctcgggaggggctgagtcgccagcaggtgttgacccgcattggagtcatgtctctcgtcaagaagaaggtccaagagtttgagcatatcaatggacgctggtcaatgccagagctgatgcctgaccccagtgctgagtccaagcgctcttccagagcctcctctccaaccaaaacatctcccaccactcctgaggcttctacaaccaacagtccttgtacctctaagcctgctactccagctccaagtgagaagggagatggtgtgaggacaccgctggacaaggatgacactgagaaccaggaagagaagccagagaagaacagcaaagtgggggaaaagatggaggcagaggtcgattctcccagcccagccccatcactgggagaacggctagaacacaggaaaattctcttagaggatgaagcaccaggggtacctggagagacagagcctgaacctggatacagaggagacagggagaagtctgcctcagagccaacaccaggagaaaggggggaggagaagccattggatgtacaggaacacagggagaggacggagggggaaacaggggatttgggcaagagagaagatgtaaaagccgatcgggagcttcgacttgggcctcctcgagatgagccacggcccaatgggcgccgtgaggagaaggtggagaagccgagattcatgttcaacattgccgatggtggtttcacagagctgcacacattgtggcagaatgaggaacgagcagctatttcctcggggaaactcaatgagatctggcaccggaggcatgactactggcttctggctggcattgtcctccatggctatgcccggtggcaagacatccagaatgacgctcagtttgccattatcaatgaaccatttaaaacggaagccaataaggggaacttcctggagatgaaaaataaattcctggcccggaggttcaagctcctggagcaggcgctggtgatcgaggagcagctgcggcgggcggcctacctgaacctgtcacaggagccggcgcaccccgccatggccctccacgcccgctttgccgaggccgagtgcctagccgagagccaccagcacctctccaaggagtcgctggcagggaacaagccagccaacgctgtcctgcacaaggttctgaaccagctggaggaattgctgagcgacatgaaggcagatgtgacccgcctgccagccacgctgtcccgaataccccccatcgcagcccgccttcagatgtccgagcgcagcatcctcagccggctggccagcaagggcacggagcctcaccccacaccggcctttcccccgggtccttacgccacacctccggggtacggggcagccttcagcgccgcacccgtaggggccctggccgccgcaggcgccaattacagccagatgcctgcagggtccttcatcacagccaccaccaacggccctccagtgctggtgaagaaagagaaggaaatggtgggggcgttggtatcagacgggctggggctggatcggaaggagccccgagcaggggaggtgatttgtatagacgactgactggatcccaggcctgcccttcacctaggccccgaccccggagccgacccacatctcaggccttggggcctgttgccaaccctccaccttccccaccccttgggccaccactgggctaggagcccttttgcccctctataatgcctcccttcaagaggacccctatctctctccacctccacacacctttcccaccaaaccttgaagactgtgctggtgtgaagaggtctaggtgggagatggttaacagggtcttccaagtacctggatgccccaccaccaaatatacacagcttcccaataaatgattgtccgggagggaggaggtggagcctcccaggcctttcttgtagtatcacctccacctcctgccaaagtgggggattagccttgcccggcctttaggaacttctatgagatcatcaaagaggaggggaaccttgttacaaagatgaaaatagcgggaggaggaagggaaggggggggggctgcatggcacttttcctccctcttccaaatggagggtacaacagctacaagtgagagagagcgagctgattgctgttcactggctcggttacctcctgtgtgtcagcatcttgcagtaggaactgttctcctccccagggaccaaggaccaccccacagagtaagggttgggtgattctccctcaagccaaagaggagctccccagcctgttctaggtgacctagaaagggtggggggaacacagagggccaggcatggggcagacccccacgctggggctcaggtttctaggggacgaaatcctccctcttcaaggcctggatacagactaaatttgagtaggtcaggccagggacctagtcaggagcctgtcttgcctgtgggaccgagcaacacagtggatatcaggctagggagattcgggcacattccccctccaaggaggggccagggagtggcagtttgcatggggaacccccatatcctccttgccgcctttcccagtctttctctcccactcctggtctgtcccaatcccttcttctgtatcaggttatcggttgtacatataaattatacttt

SEQ ID NO: 207 - DNA, 1191 bp, Mus musculus
ccgaaaagccatctttgcattgttcctgggtcgtgctccgcgctcgctgcagccaccttcgccgcccaccgcctcctccagcgcggactccggcagctctctcgccagagtcctcgaactcgacttttaattccctcactcgcggcatcggaccaccggcgtgccccaccatgtcagacgcggcagtggataccagctccgagatcaccaccaaggacttgaaggagaagaaggaagttgtggaggaggcagagaatggaagagatgcacctgccaatgggaacgctcaaaatgaggaaaatggggagcaggaggctgacaatgaggtagatgaagaagaggaagaaggtggggaggaagaggaggaggaggaagaaggtgacggtgaggaggaggatggagatgaagatgaggaagctgaggctcctacgggcaagcgggtagctgaggatgatgaggatgacgatgtggacaccaagaagcagaagaccgaggaggatgactagacaggaaaaggaaaaataaccttacgcaccgtgacctattcaccctccacttcccgtctcagaatttaaacgtggtcaccttcgagtagagaagcaggccccgccgcccacagcggcaatgccacccacagatatgacatgcgctctccaccacccctccaaaactacaacatgaattggcaacatgggaggaaaaaagaaccagaacttcccaggccctactttttttcttaaaaatactttaaaaggaaaatttgtttgtattttttatttacattttatatttttgtacatattgttaggggtcagccatttttaatgataacgggtgaccaaaccagccttcagagcgttttctgtcctacttcagactttacttgtggtgtgaccatgttcattataatctcaaaggagaaaaaaaaaaccttgtaaaaaaaaggcaaaaacaacaacaaaaaaacaatcttattccgagcattccagtaacttttgtgtatgtacctagctgtactataagtagttggtttgtatgagatggttaaaaaggccaaagataaaaagattttttttttccttttctttctgtctatgaagttgctgtttatttttttttggcctgtttgatgtatgtgtgaaacaatgtccaacaataaaccggaattttattttgctgagttgttctaac

SEQ ID NO: 208 - DNA, 5595 bp, Mus musculus
ggaccctcttatttcccagctgcaccttctcgtttgccagtaagggtctgtgagttcagcagtcatgagctccgacgccgagatggccgttttcggggaggctgccccttacctccggaagtccgaaaaggagcgaatcgaggcccagaataggccttttgatgccaaaacatctgtctttgtggcggagcccaaggaatcctttgtcaaaggaaccattcagagcaaagatgcagggaaagtgactgtgaaaacagaagcaggagcgaccctgactgtgaaagaagaccagatcttccccatgaaccctcccaagtacgacaagatcgaggacatggccatgatgacccacctgcacgagcccgctgtgctgtacaacctcaaagagcgttatgcagcctggatgatctacacctactcaggcctcttctgtgtcaccgtcaacccttacaaatggctgccggtgtacaaccccgaggtggtggcagcctatcgaggcaaaaagcgccaggaggccccgccccacatcttctccatctctgataacgcctaccagttcatgctaacagacagggagaatcagtcaatcctgatcaccggagaatccggggccgggaagactgtgaacacgaagcgtgtcatccagtactttgcaacaattgcagtcactggggacaagaagaaggaggaggcaacttctggcaaaatgcaggggacactggaggaccaaatcatcagcgccaaccccctgctggaggcctttgggaacgccaagaccgtgaggaacgacaactcgtctcgctttggtaaattcatcaggatccactttggcactacggggaaactggcatctgccgacatcgagacctatctgctagagaagtcccgggtcactttccagcttaaggcggaaagaagctaccatatattttatcagatcacatccaacaagaagccagaactgatcgaaatgctgctgatcaccacgaacccatatgattacccgtttgtcagccagggagagatcagtgtggccagcattgatgaccaggaagagctgatggccactgatagtgctatcgacattttgggctttacaaatgatgaaaaagtctccatctataagctcaccggtgctgtgatgcattatgggaacatgaagttcaagcagaagcagcgggaggagcaggcagagccagatggcaccgaagttgctgacaaggctgcctatcttcagggtctgaactctgctgacctgctcaaagccctctgctaccccagggtcaaggtcggcaatgagtatgtcaccaaaggccagactgtcgagcaggtgaccaatgctgtgggtgccctggccaaggccatgtatgagaagatgttcctgtggatggtcacccgcatcaaccagcagctggacaccaagcagccccggcagtacttcatcggggtcttggacatcgctggctttgagatctttgatttcaacagcttggaacagctgtgcatcaacttcaccaatgagaaactgcaacagtttttcaaccaccacatgttcgtgctggagcaggaggaatacaagaaggagggcatcgagtggaccttcatcgacttcgggatggacctggcagcctgcatcgagctcatcgagaagccgatgggcatcttctccatcctggaagaggagtgcatgttccctaaggcgacagacacctccttcaagaacaagctgtatgagcagcatcttggaaagtctgccaacttccagaagcctaaggtggtcaaaggcaaggccgaagcccacttctccctcatccactatgcgggcaccgtggattacaacatcactggctggctggacaagaacaaggacccactgaacgagaccgtggtggggctgtaccagaagtcttcagtgaaaactctggcttatctcttctctggggcacaaactgctgaagcagaggcaagtagtggtggagctgccaagaaaggtgccaagaagaaggggtcctcttttcagaccgtgtctgccctgttcagagagaatttgaacaagctgatgaccaacctcaggagcacccatcctcattttgtgaggtgtatcatccccaatgaaaccaagactcccggtgccatggagcacgaactggtcctgcaccagctgaggtgtaatggggtgctggagggcatccgcatctgcaggaagggcttccccagcaggatcctctatgcagacttcaagcagagatacaaagtgttaaacgcaagtgccattcctgagggtcagtacatcgacagcaagaaggcttctgagaagctcctgggctccattgacattgaccacactcagtataagtttggtcacaccaaggtctttttcaaagctggtcttctggggctcctagaggagatgagagatgacaagttggcccagcttattacccggacccaggctatgtgcagagggttcttggcgagagtggagtaccagaagatggtggagagaagggagtccatcttctgcatccagtacaacatccgcgccttcatgaacgtcaagcactggccctggatgaaactcttcttcaagatcaagcccctgctgaagagcgcagagaccgagaaggagatggccaccatgaaggaggagttccagaaaaccaaagatgaccttgccaagtcagaggcaaagaggaaggaacttgaagaaaagatggtgtccctcttgaaagaaaaaaatgacttgcaacttcaagttcaggctgaagctgaaggcttggccgatgcagaggagcgatgcgaccagctgatcaaaaccaaaatccagctggaggccaaaatcaaagaggtgaccgagagggccgaggatgaggaggagatcaacgcagagctcacggccaagaagaggaagctggaggacgagtgctcagagctgaagaaggacatcgatgaccttgaactgacactggccaaggttgagaaagagaagcatgccacggagaataaggtgaaaaacctgacagaggagatggcaggcctggatgaaaccatcgccaagctgaccaaggagaagaaggccctccaggaggcccaccagcagaccctggatgacctgcaggcagaggaggacaaagtcaacaccctgaccaaagccaaaatcaagctggaacagcaagtggatgatcttgaagggtccttggagcaagaaaagaaacttcgcatggacctagaaagagccaagagaaaacttgagggcgacttgaagttagcccaggagtccatcatggacattgaaaatgagaaacagcagcttgatgaaaggctcaaaaagaaagagtttgaaatgagcaatctgcagagcaagattgaggacgagcaggccatcggcattcagctgcagaagaagatcaaggagttgcaggcccgcatcgaggagctggaggaggaaatcgaggcagagcgggcctccagggccaaagcagagaagcagcgctctgacctctcccgggaactggaggagatcagcgagaggctggaagaagccggcggggccacttcagcccagatcgagatgaacaagaagagagaggctgagttccagaaaatgcgcagggacctggaggaggccacgctgcagcatgaagccacagcagccaccctgaggaagaagcacgcggacagcgtggctgagctcggggagcagatcgacaacctgcagcgggtgaagcagaagctggagaaggagaagagcgagatgaagatggagatcgatgatcttgccagtaatgtagagacagtgtctaaggccaagggaaacctcgagaagatgtgccgcaccctggaggaccaggtgagtgagctgaagtcaaaggaggaggaacagcagcgactgatcaacgacctgacaagccagagaggacgactgcagaccgaatccggtgaattttccaggcagcttgatgagaaggaagcgctggtatctcagttatcaagggggaagcaagcgttcactcaacagattgaggagctgaagaggcagcttgaagaggaagtaaaggccaagaacgcgctggcccacgccctgcagtcctcccgccatgactgtgacctgctgcgggaacagtacgaggaggagcaggagtctaaggctgaactgcagagggcgctgtccaaggccaacagcgaggtggcccagtggaggaccaaatatgagacggatgccatccagcgcacggaggagctggaggaggccaagaagaagctggctcagcgtctgcaggcggccgaggagcacgtagaagccgtgaacgccaagtgcgcttccctggagaagacgaagcagcggctgcagaacgaggtggaggacctcatgctggatgtggagaggaccaatgccgcctgcgccgccctggacaagaagcagagaaacttcgacaagatcctggcagagtggaagcagaagtatgaggaaacccacgctgagcttgaggcatcccagaaggaggcccgctccctgggcactgagctcttcaagatgaagaatgcctacgaggagtctctggatcagctagaaaccctgaagcgagagaataagaacttacagcaggagatttctgacctcacggaacagattgcagaaggaggaaagcgcatccacgaactggagaaaattaagaaacaagtcgaacaagagaagtgtgaacttcaggctgctctagaagaagcagaggcatctctggagcacgaggagggaaagatcctgcgcatccagctggagctgaaccaagtcaagtctgagatcgacaggaagcccgcaatgcagaagagaaagccaagaaagccatcactgatgccgccatgatggcggaggagctgaagaaggagcaggacaccagcgcccacctggagcggatgaagaagaacatggagcagactgtgaaggacctgcagctgcgtctggatgaagctgagcagctggcgctgaagggcggcaagaaacagatccagaaactggaggccagggtgcgtgaactggagggtgaggtagagagtgagcagaagcggaatgctgaggccgtcaaaggtctgcgcaaacacgagagacgagtgaaggagcttacttaccagacagaagaagaccgaaaaaatattctcaggcttcaggatttggtggataaactccaggcaaaagtgaaatcttacaagagacaagctgaggaggctgaggaacaatccaacacaaatctatccaagttccgcaagatccagcacgagctggaggaagccgaggagcgggctgacatcgcagagtcccaggtcaacaagctgcgggtgaagagccgggaggttcacaccaaaatcataagcgaagagtaaggctgtcccgatgctgtggaatgaccgaagcgaggcacaaaatgtgaaacctttggtcatgcgcctgtgtgattctattccatcctgttgtaaggaaataaagagcccaagttcctttgcaagcaaaaaaaaaaaaaaaaaaaaaaaaaaaaaaaaaaaaaaaaaaaaaaaaaaaaaaaaaaaaaaaaaaaaaaaaaaaaaaaaaaaaaaaaaaaaaaa

SEQ ID NO: 209 - DNA, 995 bp, Mus musculus
ctaaagagatgcagctgaagccgatggagattaaccccgagatgctgaacaaagtgttggccaagctgggggtcgccggccagtggcgcttcgccgacgtgctagggctggaggaggagactctgggctcagtgccatcccctgcctgcgccctgctgctcctgtttcccctcacggcccagcatgaaaacttcaggaaaaagcaaattgaggaactgaagggacaggaagttagccctaaagtttacttcatgaagcagaccatcggaaactcctgtggtaccatcgggttgatccacgcagtggccaacaaccaagacaagctggaatttgaggatggatccgtcctgaaacagtttctgtctgaaacggagaagctgtcccccgaagatagagccaagtgtttcgagaagaacgaggccatccaggcagcccatgactccgtggcccagaagggccagtgtcgggtagatgacaaagtgaatttccattttattctgttcaacaacgtggacggccatctgtacgagctcgatgggcgaatgccctttccagtgaaccatggcgccagctcagaggactctctgctgcaggatgctgccaaggtctgcagagaattcactgagcgcgagcagggggaggtccgcttctctgccgtggctctctgcaaagcagcttaagtctggggagagagaaccagccgatccccccttccctgggcaggtgcgcgcggccccgcccttggtttgcagctttagcacttagaaccacagctgtcttcttgcgttctacagccccatcccctccaccccacccaggccaccagggggctctgtcacagccacaccaggctgagcactttccctcctgtgtgtctcgtaccttgctctctacggtctctttggtttctgtctgtaagttatggccctggatgggtttgtctagtccttaaaaggaagaataaaactttgctggtgagagtatcaaaaaaaaaa

SEQ ID NO: 210 - DNA, 1602 bp, Mus musculus
caaaaaggttaggctagtatttggagaaagaagattagaaaatggaagtgaaagacgaagaagacatacaggaaggtgaagaaaaagctgttagagaagataggaaaatagaagacaaagcatctttagaagacagaaaaggtacttaaaggcacaggtagtaggaagccgaagaatagaagatagaaagaagcaagatagaaaaacaaaatggaagttaagacaactttggatgccagcattcaagataggcaaagaagataagattgagaccaaaaggttggataagatataaagtcagaaggaaattatctttaaagccataagttcaaatttctgatggagcgagcagtttagaagagtctttagacagccacatacaagattgaagctagcaatcaaagctactaggactgaagtaaaaagttaaggcagaatgcctttgaagagttagaagaatattaaaagccttaacttgtagcttaattttgcttgatgacaaaaggacttttgataacagtttcaagattgtcagcattttgcattggacttgagctgaggtgcttttaaaatcctaacgactagcattggcagctgacccaggtctacacagaagtgcattcagtgaactaggaagacaggagcggcagacaggagtcccgaagccagtttggtgaagctaggaaggactgaggagccagcagcagcagtgcatggtgaagatagcccaggaaagagtgcggttcggtggaggaagctaggaagaaggagccatacggatgtggtggtgaagctgggaaagggttccaggatggtggagcgagagcgagttggtgatgaagctagctggcggcttggcttgtcaactgcgcggaggaggcgagcaggcattgtggagaggatagatagcggctcctagaccagcatgccagtgtgcaagaaaggctgcagggagagcatgcggtgcggtaacattccttgaggtcggcaacatggtggtggttttctgtaacttggatggtaacttgtttactttgtcttaatagttatgggggagttgtaggcttctgtgtaaagagatatatctggggctgtatgtaggcctttgcgggtgttgtaggtttttctttttcagggttatgtcctcttgcatcttgtcagaagcttttgagggctgactgccaaggcccagaaagaagaatggtagatggcaagttgtctttaaccgctcagaggggaatgaatggtagagccagcacaacctcccagttttgtaagacgttgtagtttgaacagatgacctaccacaagcctcactcctgtgtaggggaggtaattgggcaaagtgcttttgggggaatgggggcaaaatatattttgagttcttttccccttaggtctgtctagaatcctaaaggcagatgactcaagggaaccagaaaaaaggaaatccactctcaggataagcagagctcgccaggtttacagtttgaaggaaggaaggaaggaaggaaggaaggaaggaaggaaggaaggaagaaagaaagaaagaaagaaagaaagaaagaaagaaagaaagaaagaaagaaaaaaaaaaaaaaa

SEQ ID NO: 211 - DNA, 9099 bp, Mus musculus
gttaaggctggcaccgcgcccggcgggaggggggcgcccaccttccttccccccccgcgccgggcatgcggggcccgctgggcaccgaggaggagctgccgcggctgttcgcggaggagatggagaacgaggaggagatgtcagaagaagaagacggtggccttgaaggctttgaggacttcttccctgcagagcccgtgagtcttcccaagaagaagccgaagaagctgaaagagagcaagtcctccaaaggtaaaaggaagaagaaagaggggagcaatgacgagatgtcagacaacgaggaggacctggaagagaagtcagagagcgaaggtagcgactactcccccaccaagaagaagaagaagaaactgaaggagaagaaggagaagaaggagaagaaggagaagcggaaaaagaggggtgaggatgaagatgataacgacgacggaggcttgaaggagcccaagtcctcgggacaactcatggcggagtgggggctggacgacgtggactacctgttttctgaggatgactaccacacactgaccaactacaaagccttcagccagttcctcaggccccttattgccaagaagaatccgaagatccccatgtccaaaatgatgactgtcctgggggccaagtggcgagaattcagcgccaacaacccgtttaagggtagctcggcagcagcagctgcggcggccgtggccgcggccgtggagacagtgaccattgctcctcccttggccatcagtccccagcaagtgccccagactctgcccatacgaaaggccaagaccaaagagggcaaggggcccggagtgaggaagaagaacaaaggcgccaaagattccaagaaaaagggcaggggcaagagagtggcagggctcaagttccgcttcggagggatcagcaagaggaagaagggttcctcgagcgaggaggatgaacgggaggactcagacttggacaatgccagcatccacagctcttctgtgcgttctgagtgctctgcagctctgggcaagaagaacaagaggaggcgcaagaagaagaggattgacgatggtgacggctatgagacagaccaccaggactactgtgaggtgtgccagcagggaggcgagatcattctctgtgacacctgcccgagggcatatcacctagtctgcctggacccggagctggagaaggctccagagggcaagtggagctgcccacactgttccagcttggcctgtttcagaactgtgtttgtgagggtcatgaccaccccaggccatctcggcgtggcccagagcactggtgcctgtcccccgctgaagggcaaagttcagcggatcctacactggaggtggacagaacccccggctccctttgtggtggggctgccaggaccagaggtggagccaggcatgcccccgcccaggcctctggagggcattcctgagagagagttctttgtcaagtgggctggtctctcctactggcactgctcctgggtgaaggagctacagttggagctgtaccacaccgtgatgtatcgcaactaccaaagaaagaatgacatggacgaaccgccaccctttgattacggctctggcgatgaggatggtaagagcgagaaacggaagaacaaggaccctctctacgccaagatggaggaacgcttctaccgctacggcatcaagcccgagtggatgatggttcaccgcatcctgaaccacagctttgacaagaagggggacatacattacctgatcaagtggaaggacctgccctacgaccagtgcacctgggagattgatgagattgacattccctactacgacaacctgaagcaggcctactggggccacagggagctgatgctgggggaagatgccaggctgcccaagcggctggtgaagaagggcaagaagctgaaggacgataaacaagagaagccacccgatacgcccatcgtggaccccacagtcaagttcgacaagcagccgtggtacatcgacgccacaggaggcacgctgcacccttaccagctggagggccttaactggttacgcttctcctgggcccagggcaccgacactatcctggctgacgagatgggtttggggaagacagtacagaccattgtgtttctctattctctgtacaaggagggccactccaaggggccttacctggtcagcgcgcccctgtccaccatcatcaactgggaacgggagtttgagatgtgggcgcctgacttttacgtggtcacctacacgggggacaaggagagccgctctgtgatccgtgagaacgagttttcctttgaggacaacgccattcgcggtggcaagaaagtattccgcatgaagaaggaagtgcagatcaaattccacgtgctgctcacctcttatgagctcatcaccattgaccaagccatcctgggctccatcgagtgggcctgcctcgtggtggacgaggcccaccggctcaagaacaaccagtccaagttctttagggtcttgaatagctacaagatcgactacaagctgctgctgacagggacccccctccagaacaacctggaggaactgttccatctcctcaacttcctgactccagagaggttcaacaatctggaaggcttcttggaggagtttgctgacatatccaaggaagatcagatcaaaaagctgcatgatctattggggccgcacatgcttcggcggctcaaggccgacgtgttcaagaacatgccggctaagacagagctgattgtccgagtggagctgagccagatgcagaagaagtactacaagttcatcctgactcggaactttgaggcgctcaattccaaggggggtggcaaccaggtgtctctactcaatatcatgatggatctgaagaagtgctgcaaccatccgtacctcttccctgtggctgctgtggaagcccctgtactgcccaatggctcctacgatggcagctccctggtcaagtcttcggggaagctcatgctattgcagaagatgctcaagaaactgcgggatgaagggcacagagtgctgatcttctcccagatgaccaagatgttggacctcttggaggacttcctggagtacgagggctacaagtatgagcggatcgacggtggcatcactgggggcctccggcaagaggccatcgacagattcaacgctcctggggcccaacagttctgcttcctgctctcaacacgtgccggtggcctgggcatcaacctggccacagcagacacggtcatcatctatgactcggactggaaccctcacaatgacatccaggccttcagccgtgctcaccgcatcgggcagaacaagaaggtcatgatctatcgcttcgtgacacgggcctccgtggaggagcgcatcactcaggtggccaagcgtaagatgatgctcacacacctggtggtgcggcctggcttgggctccaagtcgggctccatgaccaagcaggaactggatgatatccttaagttcgggacagaggagcttttcaaggacgacgtggaaggcatgatgtcccagggccagaggcctaccacacccatccctgacatacaatctaccaagggcggatctctgaccgccggcgcaaagaaaaagcacggcagcaccccgccaggcgataacaaagatgtagaagacagcagtgtgatccattatgacgacgcagccatatccaagctgctggatcggaaccaggacgccacggatgacaccgagctgcagaacatgaacgagtacctgagctccttcaaggtggcacagtatgtggtccgcgaggaagatggcgtggaggaggtagagagggaggtgatcaagcaggaggagaacgtggaccctgactactgggagaagctgctgcgccatcactatgaacagcagcaggaggacttggcccgcaacctgggcaagggcaagcgcatccgcaagcaggtcaactacaatgatgcctcccaggaggaccaggagtggcaggatgagctctcggacaaccagtcggagtattccatcggttctgaggatgaggacgaggactttgaggagcgaccagaagggcagagtggacgacgacaatccaggaggcagcttaagagtgacagggacaagcccctgcctccccttctggctcgggttgggggcaacattgaggttctgggcttcaatgccagacagaggaaggcttttttgaacgccatcatgcgctggggcatgccgcctcaggatgccttcaactcccactggctggtgcgggaccttcgagggaagagtgagaaggaatttagggcctatgtatcactcttcatgcgccacctgtgtgagccgggcgcagacggcgcggagaccttcgcagacggcgtgccccgggagggcctgtctaggcagcacgtgctcacgcgtattggggtcatgtcgctggttaggaagaaggtgcaggagtttgagcatgtcaacggcaagtacagcaccccagacctggtccccgagggggccgagggcaagaagccgggcgaggtcatctcctcagaccccaacacacctgtgcctgccagccctgcacagcttccaccggccccactgggcctgacagacaaaatggaagcccagctgggctacacagatgagaaggagtcaggcatgcagaagccaaagaagtccctggaaatccagaccctgccaactgccctggacagagtagagggtgaagacaaacatcagagctcagacagcaaggacagggctcgggaggagaggacagaagaggtggagaaggcccaggggtctccagagcagccactgaaagaggaagtgctgccggacaaggagccgatcccagacaagccggagctgagcttgggtcacagcggggatttcaggccagatgaccccaagactgaggagaaggagcccggggagactcagcaaaacggcgacagagaggaagatgaggaaggcaagaaagaagacaaaaatgggaaattcaaattcatgttcaacattgcagatggcggtttcacagagctgcacactctgtggcagaacgaggagcgggcggctgtgtcctcggggaaaatctacgaaatctggcaccgccgtcacgactactggctgctggcaggcattgtgacgcatggctatgcccgctggcaggacattcagaatgacccgagatacatgatcctaaatgaacctttcaagtctgagatccacaagggcaactacttggagatgaagaacaagtttttggcccgtaggttcaagctgctggagcaggcgctggtgattgaggagcagctccggagggcagcgtacctcaacatgacccaggatcccaaccacccagccatggcgctcaatgctcgcctggcagaggtggagtgccttgccgagagccaccagcacctatccaaggagtccctcgccggaaacaagcctgccaatgctgtcctgcacaaggtcctaaaccagctggaggagctgctgagtgacatgaaagcagatgtgacacgcttgccctccatgttgtcacgcatccccccggtggccgcccgtctgcagatgtctgaacgcagcatcttgagtcgcctgaccaaccgagctggtgaccccaccatccagcagggcgctttcggctcctctcagatgtacaacaacagctttgggcccaacttccggggccctggaccgggagggattgtcaactacaaccagatgcccctggggccctatgtgactgacatctagccgtcgtcgtgacttccccctgtttcagcgctcctttccagctgagccaagccacctgcccaacccccgcgggagagaaaagctacagcccttttaggagttggtgcggtgttggggtacaaaagggaaaccatgaaattctatcacacggaggacaggcccaggctggctgcgcaagagtccagaagtgccacctcatcgtagttgaagccttcttccacacggcatcccatctacagctacgcctggcaaggtcctggcgccttttccagagtgactgacttagaggaaattccatttacctgtaaattttttttttggcactttcctactgaagatgcaaacatgtttgtcttgataaaaagttggatgacgtgtggaagattcagattcacgacactcctgtctgtcaccggctccagacctcaaggggaagctctttggaggcccttggtgctgctgctctatggattcaactgcggccgaagagaatgcagcatccagtgctctggaaacccttagtctgccccccgcccccgtctgtacccgtgtgactgctccagacccctgcctgcttgggaccctagtgctagcctagccagggaggggatcaggtctggagagtggctgcctaccctgctgatgcccagcatgggagacggcccggtacatcccacttctgggcaggagcgcatatctcaaggtctctggcatctctcatttccagtggacacgtggtggtgccagcaatgtgtggcaggttgaagtgagggtacctcgctcagagggtggagcagatttagaccttggacaaagccccctgcaggggtttttggacattttctgtctgcaggagtgtggtatagataggtgtgagctggtgtcccagagaagggtggtgtttgttgggtggccctgcgagacttgtcccactcaccttggcaaagacaagcatcttggagtgtcctgggccacacagatgccagcagcccctcccagagctgaattgatctctgttgtcttggtcctagagaagccttgactagggtgacttctgcatgaagtaggggccacaggggcctttgctggatctccgagggtatggagagagctgtgcttggagtggggcctggagctgatggtgactttagatccttcctacccggagccttcaaggcttctgacctcatttcctgcagggaagccttaagagtgccaggcccatcttcccatgtcactgttgacacgccacttgtcttgctctaccccagcctgtggcaccacgtaacgctccatgctggggtgggggtgggtggagcctgccaggctccaggcctgtgtctgaacttcttactggcccttggctcaacctggagagatcctggggttcagtttaccctgaagatgaggacggggcttgtggagagaagccagtcgggtccgagggagcttggtaggggtcagattgtccctggaaaaggagttggggggtatgcagcatctctgggcctgccaaaaatgggggcaggtctccatggcttgttttgaggacactgggcaggtggctggcctttacttagcccagatatgtacacatctgtaacatagttcctcctctgctcctggagggctggacccccacagcttcttatactttgccactcctatacttgagtgtctatccaagtcttaaggctagcaactggccgcacactgtgggtaggcggggagggggaggggactctggccatagacaggaccactgaaggcttgagtgcattatggtggctgaccccgctctccaagaagggctgtcctctgcacaggagtgtcttccctagttcgctccccaacccagacctctgtgctaatcccaagatgggcaagatggtcagccctgttggcctcagttgccacactgacatcctaagacttaggcctgcaggctcacgtgggacagaatagggtctgtgtctcttgacttcaggggtccatcccttccctgaagacttcccccaggagtcttgctctgtccatccatctctgcttcttcctgggccatacccaccctctgtggccttcccctctccacagccaccttgacctgagacccctgctggcctgggagggccttagcgcctcagttctccagggtagactgcccaggcagctgaggagaggacaaagtccttcagagtgttcgcatcttggcccttcagctgtcgcctgctagagagtgataggatagaggtggcatcttgaggtggctctcattttgctgctgatagaactgggtcctcatgcccgagctgtcagagctgcagtgacagtgatttctagctgctttggcttgcttaattctataggatctctgtggaaggtgtggggtggctctcggtgacataggggtttgggtcagagctacatcatctgagggcaccccctcacccctgttctgaattgcttactccccataccccaggggccacctgtgagccagggttccctcccccagcctctgggtgctccctagcccatgtgggctgctggctcagtgacaccggcaaccagtctaagtcttgagtcctgcagggggcacgtggagggtaggctagggggccagggctctttgtagtctcatagagtgggcaagtgttgatgcttggagtgtctcgtgtgtgccaaggaagggggttgggggcctaggctgaccctccctccaacttcgctgtcttggtctacccacaagggctcctgcgcagaccacagccaggaggaggaggaggccaacctgcccaatttatatacccgaaagtttacaggtcgtggcgcgtcagcccaaagtctttggtgtccctgcgtttatggatatttccctcttaattttcagatttttttttttaaaaacaaaagtatttttttaggtatgataaacccggaaagggcctgttgggtatgtgtgtatgtcctgaactctccacaaagccacacggaccagagcccaggtcagaggcagctcttccacctggcctggaggggagggagggtcccctgctgcctaccagggtcaagctagactgcagggattctcttcctgcccaggccgggctggcatctgtcctacccttgcccaatcgagcacaccctgatgaagtcagagtaggtgcttggggtcagctgggagcacctcagcaggggtcccaagggcacatcaggagcccctctgaaggctgggcagaccagtggtatctccacttgtattctctgtgtgtatgttttggtttctgtgttttaataaaccctttgggaaggg

SEQ ID NO: 212 - DNA, 3882 bp, Mus musculus
ttttgccaacatggcggcgcccagagtgactggctgggtcttgctcgtgtaatgcttggggaacgaggcagaaggtagcagctggccagacagagcctgagcgcagaaagccccgcctggggctcaggaagacgagagacaagccccgcttagcccccggagctgaagggtcttctctcctgaagaatggcatccacttgtcagaggctgagtttctatgtctctcctctgaaaaggcagctagttagcaggccacctgtcatcctgtgggaaagactaattccagggtgttccagaagtatctacagtgccaccgggaagtggacaaaggagtacacactgcagacaaggaaggatgtggagaagtggtggcaccaacagataaaggagcaagcgtccagagtctcagaggaagataaattaaagcccaaattctacttgctctccatgttcccatacccttctggcaagctgcacatgggccatgtccgtgtctacaccctcagcgacaccattgcacggttccagaaaatgagaggcatgcaggttatcaaccccatggggtgggatgcatttggattgcctgctgaaaatgctgccatagagaggaatttgcaccctgaaagctggacccaaagcaatattaaacacatgaggaagcagctcgaccgcctcggcctgtgcttcagctgggacagggaaatcactacatgtttgccagattactacaaatggactcaatacctgtttatcaaactctatgaagcaggactggcctatcaaaaggaggccttggttaactgggatccagtggatcaaacagtgctagccaatgagcaggtgaatgaatatggctgttcatggcgttctggagccaaggtagagaagaaatacctccgacagtggttcattaagacaactgcttatgcaaaggccatgcaggatgcgttggcagacctcccagagtggtacggaatcaaaggcatgcaggcccactggattggggactgtgtaggctgtcacctggacttcacattaaaggttgatggagaagacacaggagagaaattgacagcatacacagccacccctgaggccatctatggcatctcccacgtggccatctctcctagccacgggcttctacatggctgcagctctgtgaagaaagccttgcagaaggcactagtccctggcagagattgcctcacaccagtgatggctgtgagcatgctcaccctgcaggaggtccccatcgttatcatggctaaccctgacttggaaggctctctagattcaaaaataggaatccccagcaccagctcagaggacaccagactggcccaagctctgggcctaccctactctgaggtcattgaagcttcacccgatggcacagagagactgagtggatctgctgagtttacaggtatgaccaggcaggatgcctttgtagccctgactcggaaagcccgtgggatgagagtgggtggacacgtgacaagtaacaagctgaaggactggctgatctcacggcagcgctactggggcacaccgatccccattgtccactgcccagcctgtggccctgtgcctgtgccactgcaagacttgcctgtgattttgcccagcattgcatctttaacgggcagaggaggctccccgctggccacggctttggagtgggtgaactgctcctgcccaaggtgcaagggatcagcaaagagagagacggacaccatggacacctttgtggattctgcgtggtactacttcagatacactgaccctcataatactcaaagtcctttcggctcggcactggcagacttctggatgcccgtggatctgtacatcggaggaaaggaacatgctgtcatgcacttgttctatgcacgattcctcagtcatttttgccacgaccaaaagatggtgaagcacagggaacctttccataaactactggcccaaggcctcattaagggacagacattccgccttccatctggacagtgtctgaagaaggaggatatagatttcacaggtcctgctcctgtttgtgcaaaaacaaaagagaagttagaggtgacgtgggagaagatgagcaagtccaaacacaatggggtggaccctgaggagattgtggcccaatatggaattgacacaatccggctctacatcctctttgcagcccctcctgagaaggacatcttgtgggatgtaaagactgacgcactccctggagtgctaagatggcaacagcggttgtggtccctgacaacaagattcatcgaggcaaggacttccgggacagtccctcagcctcagctgctgaacagcaaggagaaaaccaaggcccaaaacctctgggagtacaaaaatgcagtcatagctcaggtgaccactcatttcacagaggactttgccctgaattctgtagtttctcagctgatgggactcagcagtgccctctcgcaagcctctcagagagtggttctccacagccctgagtttgaagatgctctgtgtgccctgctggtgatggctgctcccctggcccctcatgtaacctcagaactttgggcaggcctgacgctggtaccaagcaagctctgtgaccattatgcctgggattctggtgtgatgcttcaggcctggcccactgtggactcacagttccttcagaaacctgacatggtgcagatggctgttctgatcaacaacaaggcctgtggcaagatccctgtgccccagcatgttgcccaggaccaggacaaagtccatgaacttgttctccagagcgagctaggcatgaagctgctgcaggggagaagcatcaagaaggccttcctctcccccaggactgccctcatcaacttcttggtgcaggagtgaccagggcttctaggaccctccttctctgcccagatcaagggaaggaatgttaacgtgggaaaaaaggcaaacatcagggacattggcctttgtgccaggaccagcaggagtcagcaggaggcctaaggcgagctcagggaggacagaaacctcccgtggagcagaagggcaaaagctcgcttgatcttgattttcagtaggaatacagaccgtgaaagcggggcctcacgatccttctgaccttttgggttttaagcaggatgtgtcagaaaagttaccacagggataactggcttgtggcggccaagcgttcatagccgacgtcgctttttgatccttcgatgtcggctcttcctatcattgtgaagcagaattcaccaagcgttggattgttcacccactaatagggaacgtgagctgggattagaccgtcgtgagacaggttagttttaccctactgatgatgtgttgttgccatggtaatcctgctcagtacgagaggaaccgcagctagcttgtgtctccagtgtcttttaccatcacaggccctggctctgtgctacctccctagaatacctgtggttcatcaccttcagctcacactccattcagacaatgctcacttaggcctacaagcaagggagaggcttaagcacaaggtctttaagcttgatactgtgcctggtctcaatgcctagaaattccaacttaactgtcgctatcataaaggattttaaatttttttacaagtgagaacctagcatgtcaaggtcctaggttccatctccaacacgaaaaaagcaaggcaactctaccaaagaaactaattacatacttgtattcccaatatgtgagaagctgaggaaggaggatcatgagtttaaagccatccttggttacatgagactcttgtctcaaagaactaccagggatcctaatggacaacaaaggttgaaaaccattgaattaataaatgttgtgaaccat

SEQ ID NO: 213 - DNA, 5854 bp, Mus musculus
aaaagagctaggaaagagctgcaaagctgtttgggcttttttccccctttttgttcctttttgttaccccccccctcggtctgcacccttctccggacttcacgcagaacctgcgggtttcgaagaggtggtgacagagcaggtgttggggtccaggtttggtgaggtctgggtttttgccctttttcccccctcgatttcaacattttcccgatcttgttgtcagccgccgacgcctcttacctgttctgcggcagcagcgcagctggccgctgagaccgagcggagtggggttgcgttttagattttaagcaaaggggggaaaattaagcccaatccatttttttcttcacctcctcccttttcaaggcctccaagctaattatttctgttgctttggagtgagcaattctgtggttctctccaccaccacccccaattctgacccgatcccgcctgggggtttctacggtctccgctcgctctgcgtgcacctggcgcgcctctttttttcacccccaacctgttgcaagtctttaatcctcgcaattgggacttgcgtgcaggcatctgaatcctccttgcctcatattttgcaagtgtttgggggagagcacctgctctacctgcaagagatttaaaaggaaaaaaatctccaggctccctctttctccacacactctcgctctcctgccccgccccgaggtaaagccagactccgagaaaatggtgatcagcgtggtcctcctgctgctggccgcctatgccgtaccggctcaaggcctgggttctttcgtgcactgtgaaccctgcgacgagaaagctctgtccatgtgtccccccagccctctgggctgtgagctggtcaaagagcccggctgtggctgctgcatgacttgcgccctggcggagggacagtcgtgtggcgtctacacggagcgctgcgcccagggtttgcgctgcctcccccggcaggatgaggagaagccgctgcacgccctgctgcacggccgcggggtttgcctcaacgaaaagagctacggcgagcaaaccaagatagagagagactctcgggaacacgaggaacccaccacctccgagatggctgaagagacctactcccccaaggtcttccggcccaagcacactcgcatttccgagctgaaggctgaggctgtgaagaaggaccgcagaaagaagctgacccagtccaagtttgtggggggtgcagagaacactgcccaccccagagtcatccctgcacctgagatgagacaggaatccgaacaaggcccctgccgcagacacatggaagcttccctccaggagttcaaagccagcccacgcatggtgccccgtgctgtgtacctgcccaactgtgaccgcaaaggattctacaagagaaagcagtgtaagccctcccgtggccgcaaacgtggcatctgctggtgtgtggacaagtacggaatgaagctgccgggcatggagtacgtggatggggactttcagtgccacgccttcgacagcagtaacgttgagtgacgcgtcccctcccttcctccccctatcctacccccccagccccaactccagccagcgcctccctccaccccaggacgtcactcatttcatctcatttaggggaaatatatatacatatatatttgaggaaactgaggacctcggaatctctagcaagggctaaggagacactccccaccatgaccccggaaatgtattcctttttgaagcaagttgaacggacagagaagggaaggagagaagaagcaagagggagcgagagatggaaagaaagcaaagcgttggaatagaggaaaagagggaaggacagataggattagagagagaagagagaaacagcaaggcagaaaggactccacaaccaaggctgaatctgcccttttgctttcagctctagcctggggtcagaaaaagtgtggcattcagtgacacccagtttagattggtcaaggggagaaaagaaacaaggtgtgtcagtgcctctcgggtctgtcccctcctgcagccagcagtgtggatggctagacccctcaccctcctctcctcttacccaagtgcagggtgatttcatccccaaatttacaaagactaaaatgcattccatccctctgaaaataaacaaaagtgagtgattgaagataggttttcccccagcagacaagtgaactcagaatgtgtgcaaattttactcttgttaaagatttttttaagaagtcagtacgcacccccaacactggaaagacttgattctccagggtgacaagcaattcagaagcgcgtggcttcggcccttgatttcactagactcaaagctggcccggcagcctctgtggaggaggatgagaggtggagaaaaccaaggggcttgtactcacccacaagactccatgtagactttataggcatataaatctattttctttacctttttttccctttccctttctttcgaagttttgcattacctctttaaagtagttttttttaggacactgaagatcttcctcattctgggaaaaatccatatttcacaaatacaacccagaacgccagcttggcctgcgtccaggcagcctttctcgtgagctacaagtgtggctcttttgtggggcaccgatttggatcttctcatgattccaaacgtgtgttgaagtgaatccaccaagccaggtaactgccagcacccaagggtgcatcaagtgcatagcccaggtcaccccatttcagccttccaacccgcagaaagtaactgtctcacaccacaccacataaacctgccagatccatctgtaacccactggcctgcccagacctttttttcccatctgcatttttttttttgaactgcattttgaaagcctccctcagatgccaggctgacagatcagagagaaactaacatgagagatgacagaggaggaggaagtggagggtgggggcagagacttccacagagagacatagaagatggagcagaggtctgggggtggggaggacaagaaagagacagagagaggaaaataccaatagaattttccttggtgtctcccatctaatcaactctctgagatttgagaggaaaaagaaggcaggggaagaacttgaggtagaaatgaggtcagttcaagtcacagggcccagatggtgggtaactgaggcaggatccagacttgagacacacggttggaaacaaggctggttagcctgactgggtattgaagggtgaagaggatgccttggaaagacagcacaacttcagttcaacttcaggcccccaaggaggaactgaggccaaagaatccttcaagtgcttcatgagtctcctctgcccgactcaaacatccttccctgtgatggaggatggtagaaagcccaggacaactcaggcccggatcttcacgactgttgtcatttgccagcctgattttgatccaagagaagcatctcattgcccactggcttcttcaacaaagaggtgcttaacaaaaggctcaggactgtctttgaagactgaagataaccttccaggagaggagactcggacattggtacaggaggccccttttggcgggggacacagctctttgcgctctcttgatggcatggcatagtagaggccccctccaacccggaacatggagcaacacaaagggagagcaaagaaactgacgtgcgtcgactcataggacatgggtggctgcgggcacagaaagggatgcctcctgttgcctggacaggacagttggctgggaaggaaagagaaaattgatcttcataagacaaagggcctgatgggatggcaatagaaggacttaccagacctgcagggtcagtatacccatcaccccgcacaacatccccaacccccaactcaaacttcaatatatcttaggccagtatcctagacctaagtctctcctttctgccattatttctccgcatcttgagcagtcatctgactgagatttgccaagtggatactggggtaccactgccccccaagaaaagactgagccaggaactgcctactcgctccccctcccgagcctggagctaactcctgtgaggggtgctctcttcaccccacaacttactagaccttgagtgagcctctgtcccttatgtgggctcttcgctgtgagccacagatggaggtcattgtatagacagttagccttccccaggtcagcctacctcccccaaacttgtgagtctccccgctgctcatatggagaggcatgtctaagacagcaagtcttctagaggaagcttgcctttaacagacagatggaactaaaccttccaaatgggagatctggctgaacccaggatacagagaccatggacatggatggggtcatcaagagaagagggatgtccttctccaggttagggagagagaaggcaagtttgcaacgatcccatcatgccctgagcaagaagcttttggcccaggctagcctttaactccattagaggcctctctgttgggtttatccacagcagtaggcccaagtatggcctgtccccacctctactatcccgtggaaggtttcttcccacccctttttgacaaatgcctcactcgagcagtggaaagatagctctcttccccctctactgccaggtaacaaagagacctaaccaggacctattctccaccccagccagtcttgaccagccagaacaaagcagggaacctggagaataaaagactctacgttcctctgacaaagactctacgtttctctgacggccaggcctaaacagacaaggcttgggaacatctgccccacaggatacggaggaggtcagctgtgctcactcctcttctccttccaagaccctcttccgaccatgacttatctccatggtaacatcctcaccatcattctcccactaccaagggttgccatggcaacctcccaaccacctgcccatcccaggcagggcagctgtccttctgctcagaaccctagaggactctaggtgaaattttacagcttaagagaggagtgagccaaggagaagagaccctgtagtcctctggctttcaagagaaagaaggctatgatttaaaacacagtagaagggaaagaggtctcgtcgacctctcccggggagcttaggggttgtactgtctttattttttaaaccactaaagtgcaatgtttcctgcactcttgttaccccgcctctcttccctgttaggttttcatttccttgagcagactttcttggttttttaatggagtatagactttcaccacttcacagactctggcctcctctccaagtctctctggatggggaaaaggaaggtagagggtcagaggggaaggggtccctcgtcaccccgcatccattcacccccacttctctggtccctagtcaccggcttcagcccccatctccgacaccatcactgtcacacagtagcctgtcacacggatagtacagttcagacaagactccttcagattccgagacgcctaccggttgtttttggtttttgttttgttttcttttgtttgtttgtttgttttttacaacagcaataaccacatcacatattactgtagctctctatagtgttacgttcagacaccgtagctctgtcctctcttattttgttggttttgacttaaaaaaaaatacttatgctttttactggtgaaacagattgaaaaaaaaattgaacaacaaaccagtttgtgaaaaaaaaaaaatgggaaaaaaaatcaccccgatgtggaagagctcggctcctctttagcattttgtacttaaggaaataaaaaagaaaaacctg

SEQ ID NO: 214 - DNA, 1539 bp, Mus musculus
cagcactgcagagtgatcaccatgtccgttcgcttttcttccgcatccagacggctgggctctgtgaggctctccagcgcgggagcagccttgggggctggaaacgcatgcggagtgccgggcatcggaagcggcttctcctgcgcctttgggggcagttcattggcaggggggctcggtatgggcggtgcttcttgtggggccttcacagcgaatgagcacggcctcctctccggcaatgagaaggtcaccatgcagaaccttaatgaccgcctggcctcctacctggagaacgtgcaagcactggaggaggccaatgctgacctggagcagaagatcaaggactggtatgaaaaatttggacctgggtcgtgccgcggtctcgatcatgactacagtagatacttccccatcattgatgacctcaggacccagatcatctctgcaactgcacacaacgccaacatcatcctgcaaaatgacaacgcaagactgacggcggatgacttcagaatgaagtatgagaatgaactggcactccaccagagcgtcgatgctgacatcaatggcttgcggagggtcctggatgagctgaccctgtgcagaaccgaccttgaggtccagctggaaacactcagtgaggagctggcatacctcaagaagaaccacgaggaggaaatgcaggctctgcagtgcgccgctggaggcaacgtgaacgtggagatgaacgcagccccgggcgtggacctcaccgtcctgctgaacaacatgagagccgagtacgaggccctggctgagcagaaccgtagggacgccgaggcctggttccaagagaagagcgcctccctgcagcagcagatttcagacgatgctggagccaccacctcagccaggaacgaacttacagagatgaaacggactctccaaaccctggagatagagctacagtccctcttagccatgaaacactctctggagtgctccctgacggagaccgagggcaactactgcacgcagctggctcagatccaggctcagatcagcgccctggaggagcagctgcaccaagtgaggacggagacggagggccagaagctggaatatgagcagctgctgaatgtcaaggcccacctggagaaggagatcgagacctactgccgcctcatagatggagacgagggctcttgtgttaaggcaaaaggccaaggaagacccggaaatcagacaaaagattcgcctaaaactgccatcgttaaaactgtcgtggaagagttagacccccgtggcaaggttctctcctccagagttcacaccctggaagagaaatccaccaaagtcaacaagaccgagcagaggatcccttcttgaactccgcctctaaagcagacggctctagtttcaaataccaaatctaaatgcttttcctacgttatgtttctgcttctctccagtgagccgagatgagctcctaatagattagtgacattctttgactttctctctggtgatgcttcaataaacgtcttcctgttgcaagtt

SEQ ID NO: 215 - DNA, 7523 bp, Mus musculus
tatatcgaattcgggaagcccgttccgactgccggcgacgcggtctgggcccgacgctccagcgccatccattttcagggctagttgattcggcaggtgagttgttacacacttcttagcgattccgacttccatggccaccgtcctgctgtctatatcaaccaacaccttttctgggtctgatgagcgtcggcatcggcgccttaacccggcgttcggttgatcccgcagcgccagtctgcttaccaaagtggcccactaggcactcgcattccacgcgctccacgccagcgagccgggcttcttaccattaagttgagaactctgaaaagtaactgatgtggacaagcagctgagacagtcaagatgacgaccacggtagccacagactatgacaacattgagatccagcagcagtacagtgatgtgaacaaccgctgggatgtggatgactgggacaatgagaacagctctgcaaggctctttgagcgctcccgcatcaaggccctggcagatgagcgtgaagctgtacagaagaagaccttcaccaagtgggtcaattcccaccttgcaagagtgtcctgccgaatcacagacctgtacacggaccttcgagatggacggatgctcatcaagctactggaggtcctctctggagagaggctgcctaaacccactaagggacggatgcggatccactgtctggagaatgtcgacaaggctcttcaattcctgaaagagcagagagtccatcttgagaacatgggctcccatgacattgtggatggaaaccaccggctgaccctcggcctcatctggacaattattctgcgcttccagatccaggatattagtgtggagactgaagataacaaagagaaaaagtctgctaaggatgcattgctgctgtggtgccagatgaagacagctgggtaccccaatgtcaacattcacaatttcaccactagctggagggatggcatggccttcaatgcactgatacataaacatcggcctgacctgatagattttgataaactgaagaaatctaatgcacactacaatctgcagaatgcatttaacctggcagagcagcaccttggcctcactaaactgttagaccctgaagatatcagtgtggaccaccctgatgagaagtctatcatcacatacgtggtgacttactaccactacttctccaagatgaaggccttggctgtcgaaggaaagcgcattggaaaggtgcttgataatgctatagaaacagagaaaatgattgagaagtacgagtcacttgcttctgaccttctggagtggattgaacaaaccatcatcatcctaaacaaccgcaaatttgctaattcactggttggggtccagcagcagctccaggcattcaacacgtaccgcacagtggagaaaccacctaagtttactgagaaggggaatttggaggtgctccttttcacaattcagagcaagatgcgagcgaataatcagaaggtctacatgccccgcgaggggaagctcatctctgacatcaacaaggcctgggaaagactggaaaaagcagaacatgagagagaactggctctgcggaatgagctcatacggcaggaaaaactggaacaactcgcccgaagatttgatcgcaaggcagctatgagggagacatggctgagtgaaaaccagcgtcttgtgtctcaggacaactttggatttgaccttcccgctgttgaggctgctaccaaaaaacacgaggccattgagacagacatcgctgcatatgaagaacgagttcaggccgtggtggctgtggccagggaacttgaagccgagaactaccatgacatcaagcgcatcacagcgaggaaggacaatgtcatccggctctgggaatacttgctggaactgctcagggccaggaggcagcgtcttgagatgaacctgggattgcaaaagatattccaggaaatgctttatattatggactggatggatgaaatgaaggtgctattgctgtctcaagactatggcaaacacttacttggtgttgaagacctgttacagaagcatgccctggttgaagcagacattgcaatccaagcagagcgtgtaagaggtgtgaatgcctctgcccagaagtttgcaacagatggggaaggctacaagccatgtgacccccaggtaattcgagaccgtgttgcccacatggagttctgctatcaagagctttgtcagctggctgccgagcgtagggctcgcctggaagagtcccgtcgcctctggaagttcttctgggagatggcagaagaggaaggctggatacgagagaaggaaaagatcctgtcctctgatgattacgggaaagacttgaccagtgtcatgcgcctgctgagcaagcaccgggcatttgaggatgagatgagtggccgtagtggccattttgagcaggccattaaagaaggtgaagacatgattgcagaggaacactttggatcggaaaagatccgtgagagaatcatttatatccgggagcagtgggccaacctggaacagctctcagccattaggataaagcgcctagaggaagcctcattactgcaccagttccaggctgatgctgatgatattgatgcttggatgttagatatactcaagattgtctccagcaatgatgtgggccatgatgagtactccacgcagtctctggtcaagaagcataaagatgtagcagaagagatcaccaactacaggcccactattgacacactgcatgagcaagccagtgcccttccacaagcacatgcagagtctccagatgtgaagggccggctggcaggaattgaggagcgctgcaaggagatggcagagttaacacggctaaggaagcaggctctgcgggacaccctggccctgtacaagatgttcagtgaggctgatgcctgtgagctctggattgacgagaaggagcagtggctcaacaacatgcagatcccagagaagctggaggacctggaagtcatccagcacagatttgagagcctagaaccagaaatgaacaaccaggcttcccgggttgctgtggtgaaccagattgcacggcagctgatgcacaatggccaccccagtgaaaaggaaatcagagctcagcaagacaaactcaacacgaggtggagtcagttcagagaactggtggacaggaaaaaggatgctcttctgtctgccctgagcatccagaactaccacctcgagtgcaatgaaaccaaatcctggatccgggagaagaccaaggtcatcgagtctacccaagaccttggcaatgacctggcaggtgtcatggccctgcagcgcaagctgactggcatggaacgagacttggtagccattgaggcgaagctgagtgacctgcagaaagaagctgagaagctggagtccgagcaccctgaccaggctcaagctatcctgtctcggctggccgagatcagcgatgtgtgggaggaaatgaagacaaccctgaagaaccgagaggcctccctgggagaggccagcaagctgcagcagtttctgcgggacttggacgacttccagtcttggctctccaggacccagactgctatcgcctcagaggacatgcccaataccctcactgaggcagagaagcttctcacacagcacgagaatatcaaaaatgagatcgacaattatgaggaagactaccagaagatgcgggacatgggcgagatggtcacccaggggcagactgatgcccagtatatgtttctgcggcagcggctgcaggccttagacactggctggaatgagctccacaaaatgtgggagaacaggcaaaacctcctctcccagtcccatgcctaccagcagttccttagggacaccaaacaagctgaagcttttcttaataaccaggagtatgttttggctcatactgaaatgcccaccaccctggaaggagctgaagcagccattaaaaagcaggaggacttcatgaccaccatggatgccaacgaggagaagatcaatgctgttgtggagactggccgaagactggtgagcgatgggaacatcaactccgaccgcatccaggagaaggtggactctattgacgacagacacaggaagaatcgagaagcagccagtgaacttctgatgaggttaaaggacaaccgtgatctacagaagttcctgcaagattgtcaagagctgtccctctggatcaatgaaaagatgcttacagctcaagacatgtcttatgatgaagccagaaatctgcacagtaaatggttaaagcatcaagcatttatggcggaacttgcatccaacaaagaatggcttgacaaaattgagaaggaaggaatgcagcttatttcagaaaagccagaaacagaagctgtggtaaaggaaaaactcactggtttacataaaatgtgggaagtccttgaatccacaacccagaccaaggcccagcggctctttgatgcaaataaggctgagcttttcacacaaagctgcgcagatcttgacaaatggctacatggcctggagaagccaggatttcaatctgacgactatggcaaagaccttacccagtctcaatattcttctgaaaaaggcaacagacgccggagaatcagatggaagttcggaagaaagagatcgaggaactgcagaccaagcccaggctcttctaggggaagggcacagatgagggtggacagcaaacgccttactgtgcagaccaagttcatggagcttctggagcccttgagtgagaggaagcataacctgttagcttccaaggagatccatcagttcaacagggatgtggaggacgaaatcctatgggttggcgagaggatgcctttgcgaacttccacagatcatggccataaccttcaaactgtgcagctgttaataaagaaaaaccagaccctccagaaagaaatccagggacaccagcctcgtattgatgacatctttgagaggagtcaaaacatcatcacagatagcagcagcctcaatgccgaggctatcaggcagaggctcgctgacctgaagcagctgtgggggctcctcattgaggaaactgagaaacgccatagacggctggaggaggcacacaaggcgcagcagtactactttgatgcagctgaagccgaggcatggatgagtgaacaggagttgtacatgatgtctgagaaaaggccaaggatgaagcagagtgctgtctctatgttgaaaaagcaccagattttagagcaagctgttgaggactatgcagagacagtacaccagctctccaagactagccgggcgctggtggctgacagccatcccgaaagtgagcgtattagcatgcggcagtcaaaggtcgacaagctgtatgctggcctgaaggaccttgctgaggagaggagaggaaaacttgatgagaggcacaggctgttccagctcaacagagaggtggatgacctggaacagtggatcgctgagagggaagtggtcgcaggctcccatgagttgggacaggactatgagcatgtcacgatgttacaagaacggttccgagaatttgctcgagacacaggaaacattgggcaggaacgtgtggatacagttaataacatggcggatgagctcatcaactctggacattcagatgctgccaccattgctgagtggaaagatggtctcaatgaagcctgggctgacctcctggagctcattgacacaagaacacagattcttgctgcctcatatgaacttcataagttttaccatgatgccaaggagatctttggccgaatccaggacaaacacaagaaactccctgaggagcttggaagagatcaaaacactgtggaaactttacagagaatgcacaccacctttgagcacgacatccaagctctgggcactcaggtgaggcagctgcaggaggatgcagctcgcctccaggcagcctatgcaggggacaaggctgatgacatccagaagcgtgagaatgaggtcctggaagcctggaagtccctgctgggtgcttgtgagggtcgcagggtgcggctggtagacacaggagacaagttccgcttcttcagcatggtgcgtgacctcatgctctggatggaagatgtcatccggcagatcgaggcccaggagaaaccacgggatgtgtcatctgttgaactattaatgaataatcatcaaggtatcaaagctgaaattgatgctcgtaatgacagctttacagcctgcattgaacttgggaaatccctgctggcacggaaacactatgcttctgaggagatcaaggaaaagttactgcagctgacggagaaaagaaaagaaatgattgacaagtgggaagaccggtgggagtggttaagactgattttggaggtccatcagttctcaagggatgccagtgtggcagaggcttggctgcttggacaggaaccatacctatccagccgcgaaattggccagagtgtagacgaagtggagaagcttattaagcgccatgaggcgtttgaaaagtctgcagcgacctgggatgagagattctctgctctggaaaggctgacaacgttggagctactggaagtgcgcagacagcaagaggaagaagaaagaaagaggcggccaccttctccggacccaaacacgaaggtttcagaggaggctgagtcccagcaatgggatacttcaaaaggagaccaagtttcccagaatggtttgccggctgagcagggatctccacggatggcaggaaccatggaaacgagtgaaatggtcaacggtgctgctgagcagaggacaagctccaaagagtccagtcctgttccctctcccacctcggaccgaaaggccaaatctgcacttccagcccagagtgctgccaccctgccagccaggaccctggagacacccgctgcccagatggaaggcttcctcaatcggaagcatgagtgggaggcccacaataagaaagcctcgagcaggtcctggcacaatgtatattgtgtcataaataaccaagaaatgggcttctataaagatgccaagagtgctgcttctggcatcccctaccacagtgaggtccctgtgagtttgaaagaggccatctgcgaagtggcccttgattacaaaaagaagaagcacgtgttcaagctaagactaagtgatggaaacgagtacctcttccaagccaaagatgatgaggaaatgaacacatggatccaggctatctcctctgccatctcctctgacaaacacgacacatctgccagcacccagagtacgccagcatccagtcgggcgcagaccttacccaccagcgtcgtcaccatcaccagcgagtccagtcctggcaagagggcagaagataaagagaaagacaaagagaagaggtccaccgttttcggcaagaagaagtgaacttccctgttgtcccgcccttctcttacctttagtaagagtccagcatgcaagttccgaccccc

SEQ ID NO: 216 - DNA, 3638 bp, Mus musculus
  misc_feature (3636)..(3636): n is a, c, g, or t
tagggcgactgcacgggacgccgcggaggacgcgcgctcgcggcccggggcgccacgtgctcgagttctgctaggttggctggcgcaggaggagcgggctgcgcgatccagaggggccgccagggaccgccgcgccacgtgccgctagccgagtcggcctccccatccgattgatcatttttcctggacagagcgacccggccgcctcgggccaccagcacctgcccgcgcgcggcgatcttcttccctctcccgcgctccgcagcactctgcccccatgctccgcgaccccaccaccaccgggtggccgcccctcctgctgctgctattgcagctgccgccgccgccactcgtctgcggagccccggcggggccgggaaccggggcgcaggcctcggagctagtggtgcccacgcggttgcccggcagcgcgagcgagctcgccttccacctgtccgccttcggccagggcttcgtgctgcgcctggcgcctgacgccagcttcctggcgccggaattcaagatcgagcgcctcgggggctcgagcgcggcggccgggggcgagccgggactgcgtggctgcttcttctctggcacagtgaatggagaacgggagtcgctggcggcgatgagctgtgtcgcgggctggagcggctcgttcttgctggcaggcgaggagttcaccatccagccacagggcgctggggactccctggaccagcctcatcgcctgcagcgctgggggccgggacagcgccgcgaagaccccgggctcgctgccgccgaagttttccccctccctcaaggactggagtgggaggtggagatgggtaatgggcagggacaggagagaagtgacaacgaagaggacaggaagcaggacaaggaggggttgctcaaagagacagaagactcccgcaaagtgccaccacccttcggatccaaaactagaagcaagaggtttgtgtccgaggctcgcttcgtggaaacacttctggtggctgatgcgtccatggctgccttctatgggaccgacctgcagaaccacatcctcacggtgatgtcaatggcagcccgaatctacaagcacccgagcatcaggaactccgtcaaccttgtggtggtgaaagtgctaatagtggaaaaagaaagatggggcccggaagtgtccgacaacggggggctcacactgcgcaacttctgcagctggcaacggcgtttcaacaagcccagtgaccgccacccggagcactatgacactgccatcttgttcaccagacagaacttctgtgggaagggagagcagtgtgacaccctggggatggcagacgttggcaccatctgtgaccccgacaagagctgctcagtgatcaaggatgagggactgcaggcagcctacaccctggcccatgagctagggcacgttctcagcatgccccatgatgattctaagccctgtgtgagattgtttgggcccatgggcaagtaccacatgatggcgccattcttcatccacgtgaacaagacgctgccctggtctccctgcagtgctgtctacctcacagagctcctggatgatggtcacggagattgtcttctggatgcccccacctcggttctgcccctccccacaggcctcccgggccacagcaccctctacgagctggaccagcagtgcaagcagatctttgggcctgatttccgacactgccccaacacctctgtggaggacatctgtgtccagctctgtgcccgtcatcgggatagtgatgagcccatttgccacacaaagaatggtagcctgctctgggctgatggtacaccctgtggccctgggcacctgtgcctggatggtagctgtgtactcaaggaggatgtggagaatcccaaggctgtggtagatggagactggggtccctggagaccctggggacaatgttctcgcacctgtggtggagggatacaattctcgaaccgtgaatgtgataatccaatgcctcagaatggaggaagattttgcctgggtgaaagagtcaagtaccaatcatgcaacacagaggaatgtccaccaaacggaaaaagcttccgggagcagcagtgtgagaaatataatgcctacaaccacactgacctggatgggaatttcctgcagtgggtccccaagtattcaggagtgtccccccgagaccgatgcaagctgttttgcagagcccgtgggaggagtgagttcaaagtgtttgaagctaaggtgatcgatggcactctgtgtggaccggatactctgtccatctgcgtccgggggcaatgtgttaaggctggctgtgaccatgtggtgaactcacctaagaagctggacaaatgtggggtgtgtgggggcaaaggcactgcctgtaggaagatctccggttctttcacccccttcagttatggctacaatgacattgtcaccatcccagctggtgccacaaacattgatgtgaaacagcggagtcacccaggggtcaggaacgacggcagctacctggcgctgaagacagccaatgggcagtacctgctcaatggtaacctggccatctctgccatagagcaagacatcttggtgaaggggaccatcctgaagtacagtggctccatggctaccctggagcggctgcagagcttccaggccctgcctgagcctcttacagtacagctcctgactgtgtctggtgaggtcttccctccaaaagtcagatataccttctttgtccccaatgacatggacttcagcgtgcagaatagcaaggaaagagcaaccaccaacatcattcagtcactgccctctgcggagtgggttctgggagactggtctgaatgtccgagcacgtgcagaggtagctggcagcggcggactgtggaatgcagggacccctcaggtcaggcctctgacacctgtgatgaggctctgaaacctgaggatgccaagccctgtggaagccagccgtgtcccctctgatccccttggtggaaatctcttaggcttatggatttgggctactggtgtaacagacaaaggtcccctccaaggtgatactacatatcaagatggcacggccctttcaggccttctattactacaaccccttgggtactacctaattcataaggaagagagaagagggtataagggtaacagattgtaaagttgactgtctggtggactggaccttgcttatgaccaagaagtcgggataggttaaaaggtagaagtgcacttattgatccaaatgggagatttcagagccagtctctttgcaaaggactagcaaagctaaatgaaaaagaagaattttttttttctatttggtttccccaataatcaatctacctcacagcggggaaaaatcagtatacaagaggtataaggccaggtgttggcagtgaacgccaaagcaagctccataggtatctccaagctatcttcagaaatgtccgtggctgttttcagtattaaaatctgttgtctaaaagggcagcagtgtccatcacagggttatagaaagccacttttctcaggctgccacctgctggggcggacccatttcaagtatttatgcaaatatgtctccgaactaaagtgtgtcttacaccaaaagngc

SEQ ID NO: 217 - DNA, 4374 bp, Mus musculus
gggcgcggggcagcggggcagcgggcagagcgacgcggagttctggcggtgcggaccccgacgacgccctggccccgagcctgcgccatccgggtcgccctcgagcgccggagcgccgcccggaggccgccctgcaggctctgcctgtcctgggacgttcgtggccccgcccacctaaaaaagcccatccacagacgccatgcagggggctctgatgcccctgccttcgctgctgctgttgctgttggggtgtgggccaagagtgtcctctggcggcggagctgggggtgcagcgggctatgccccggtaaagtatgtgcagcccatgcagaaaggacccgtgggaccgcctttccgagagggcaaaggtcagtacttggaaatgcctctaccgatgctgccaatggacttgaaaggagagccaggtccccctgggaagccgggacctcggggtccccctgggcctcctggcttcccaggaaaaccaggcactggaaaacctggggttcatggacagccaggccctgctggcccccctggcttctcccgaatgggcaaagctggtcccccagggctcccaggcaaggttggaccaccagggcagccagggctacggggggagccagggatacgaggggaccagggcctccgggggcccccaggaccccctggccttcctggtccctcaggtattactgtccctggaaaaccaggtgcccagggggctccagggcctccaggatttaggggggagccaggaccccagggagagcctgggccccgaggagataggggcctcaaaggggataatggagtgggccaaccagggctgcctggagcccctggacaggcaggtgcccctgggccccctgggctgcccggtccagctggcttgggcaaaccaggtttggatgggataccaggagccccaggagacaaaggtgattctggcccccctggggttccaggttctaggggagagccaggagctgtgggtccaaaaggccctcctggggtagatggtgtggggataccaggggcagcaggggtgccagggccacagggtccagtaggggctaaaggagagccagggctccggggcccccctggcctgataggccctgttggctatgggatgccaggaaaaccaggacctaagggagacaggggcccagttggggccccagggctcttaggagacagaggtgagccaggagaggatgggaagccaggggagcagggtccacagggacttgggggtccacctggccttcctgggtctgcagggcttcctggtagacgtgggccccctgggtcaaagggagaggtaggacctggaggtcccccaggagtgcctggcattcgaggagaccaagggcctaatggcctggctgggaagcctgggctccctggtgagaggggacttcctggggcccatggaccccctggaccgactgggcctaagggtgagccaggttttacaggtcgccctggagggccaggggtggcaggagccctaggacagaaaggtgacttggggcttcctgggcagcctggcttgaggggtccctctggaatcccagggctccagggcccagctggccctattgggcctcagggtctgccaggcctgaagggtgaaccgggccttccagggcctcctggagagggaaaagtaggggagcctggctctgctggtcccacagggccccctggagtccctggctccccaggactcacaggtcctcctgggccccctgggcctcctgggcctcctggtgcccccggagccctggatgagactggtatcgcaggcttgcatctgcccaatggtggcgtggagggagctgtactgggcaaaggaggcaagccacagtttgggctcggtgagctgtcagcccacgccactccagcctttactgcagtgctcacttcccccttccctgcctcaggcatgccggttaggtttgaccggactctctacaatggccacagcggctacaacccagccactggcatcttcacctgccccgtgggaggggtctactactttgcataccatgtgcatgtcaagggcaccaatgtgtgggtagccctgtacaagaacaatgtgccggccacctacacgtacgacgaatacaagaagggctacctggaccaggcttcgggaggggctgtgctccagctgcggcccaatgaccaggtgtgggtgcagatgccctcagatcaggccaatggtctctactccaccgagtacatccattcgtccttctcaggattcttgctctgtcccacataacccgtgggggggcccctgctgccctggcctcctcctctttagcgatagagagacctttccagttacagagatttccatcggaaggaaagaaccaaaaagctgaacaggggcagcggcggccttcttcttgccccgagaagactgacctgctttctgtaggctgaagttgtttctggaagagggtggcctagtttcctttcccccaggtgtactgtgggggttgtccctctgttctggacctgcctggtctgcaggcagcaccccagagtactcagcctgggccccctcatgagtcctggaagctgctgggagagatggttttcctgttggccttcgatggcatggaatgagcccagggcttcctgtgttcgctgggtctcttccagctccccgggagcctccagcatctgatacgacattaggttctctgaggtttttgtttcctgttgggagaaaggaagaagggaatggggaccatagaggcagtccatatggatagatgcctggagtgatgttgtgagctcagaccagtcctggtggggacagttgtatggcctctggaagactcctgaagcagtcatctgtggagatccgtgagaggacatggatcaggggcaagctggtcactcttccgtttccctggctgtctccattggctctggttcttcagtatgagggtggacacatgggctgagatgggactctgtgtagtgtctatacagattgcagagccaaccaggactgatgatcaagcaaacacgatgcccctccctctttcttctcacctgctgggggtttggggtaattcatgatcagactgttaggggaggcttggcaaccccaaactaagtgtcttcaaggcagagagcctctcgctaggccctctgaacacaggcacacaagcttatgggtgaagacgtctgtttctccttaataagaaccatgctgtgggtatttagtgtctactagaggggctcatctgtgggcacttcctccctctccaccctccgcttccaatttcctgttttaagcagtggagggcccaggaggctaaggctctgaaagaaaggatgccagcaggccccactggaatgagccggctctagaggctcctacccgcctccctaatcaggatgctcctgcaggaaacaggcgggcttgcttcccagctgggctcaatgctgggggtagggatggtggacattcttgcatatgtagggatggctgccttctctggttcatgactttcctcagccctcacctagtcagcccacttccctgaccaagtgggaatctgggacatcgaataggcaacccagcttgggctccaatttgggcacagtcagctgcccgagtgacacactgaggatgagggcctagtctccttcccgcagcctgcaactgcaaggcagcctagtggactgctcacttcagtttccaaagggggaatctgcctgagacagcaaggaaaaaagtcctgcctgggactctgagtccttttttttttctgccacacctaagaggaccagctagagactagtatccctgtggggccttttcagtctcctccttccccaggtcaaagccactaatccaatgggttctggcggtaagagattagtcaactcccagagggagccctgaaggctggttcagggcagagctgccagaccccaccccaaagcctttagagaaggattctaacgtctgtggattggagctgtagatgtcactgaccagcgttgacaaacaatgtcaggctttaactatgacaactccacttaccttgtgcatttttgtattttggttcttcttcttctcttttttttttttttttaaagattaagcttttccacttgatatttcatttctaacctggtacaggaagttcctctctacttaccacatatcacatatcaggttcaggaaaaatgcaccgggaatcagagaaaatgggatttcttttcaattgaaaagacaacgacagtgctgttattgaccacccccaataaaacctgttgtagaaacacaaaaaaaaaaaaaaaaaaaaaaaaaaaaaaaaaaaaaaaaaaaaa

SEQ ID NO: 218 - DNA, 1014 bp, Mus musculus
gacactacctctgttgctgctgctggtggtggtggtgatagcctggcctctggcagtacagtccgcgccccccacctgctactctcggatgctgaccctgagccgtgagatcatggcagacttccagagcctgcaggcttcagagcctgaggattcctgtgtgaggtacttgccccggctttacctggacatccataactactgtgtgctggccaagctgagagacttcgtggcttctcctcagtgctggaagatggccgaagtggacactctgaaggacagagtgcggaagctgtataccatcatgaactccttctgcaggcgggacttggtattcctctcagatgactgcagtgccttagaagacccaattcccgaggccacgggtcctccagactggcagagctaagcaggtggaccagaagaacaacccagaggtctgaagctgggccagttgtccagagttacaccccccacacacacacccaggtctacttttagtgccactgttagacctgccacatgtctctagcttctgaaacaccagtgagggtcctacctctgagcatgctttgtgcacaggttggaagctcagctcagctcctaggtgtctcattggaatgtaagaggcacaaagaggaaagtgcacactggcttcgctttggagagcaagcaccttaggaacagcaaaatctcatgcctttgtgactgttttaatgaactaatgggaccactcttctttctggtctctgcttacacctacaggggcttcaactttatgcttccttcttcctgtgcaagctttcctgcctctctctcattttaaagtgtttttactgcttttgcgatacatttacaaggcttttatgtagtgtaaacgagccaccctttcgctgaagggtgatgaaaaccaaataaacctctgtcgtgagaaaaaaaaaaaaaaaaaaaaaaaaaaaaaaaaaaaaaaaaaaaaaaaaaaaaaaaaaaaaaaaaaaaaaaaaaaaaaaaaaa

SEQ ID NO: 219 - DNA, 1213 bp, Mus musculus
cggccacttggagcagctctgccgcggggactgcactgtccgccctgccagacccgccccgactggggctcgccgtcgccagcagtcagcactgcgacctcgggcccttcgccggctatggctgcgtcctggggctgagcccgcaggttgtgtgaccaagattcgcaaagaaagagagagagagaccgatacagaaagagaagaaggaggggcgggctcctggcaaggcgtttgctcctgagcagagtcctgcaaagatggagaaggaggaagagacaacccgggagctgctgctgcccaactggcagggcagtggttcccacgggctgaccattgcccagagggatgatggagtctttgttcaggaggtgatgcagaactcccctgcggcccgcactggggtggtcaaggagggggaccagattgtgggtgccaccatctactttgacaacctgcagtctggtgaggtgacccagttgctgaataccatggggcatcacactgttggcttgaagttgcaccgtaaaggggaccgttcccctgagcctggacagacctggacccatgaagtcttcagttcccgtagctctgaagtggttctgaacacggtacaaccttcatccctggactgcaatgaccagaataaacccaaggaagctatcaacaaagctggggcagcatcagactccaccccagatgcaggttctgcatttcaaccacaggggtctccagggctacaaatctgcctctccaccttgacttccagctgcctggcactttcggcatgactactcactttctgtgctgtctaaagttctatctcagatctcagcttcctcaatagcccctatggctgtagcagtggccaggaagaaaactgcccccactggaggttgtttttgtgattgttctttggagcattgttctaaaaatgggaaatcacatcttgccatgccaaaggaaacaaacacctgcagttaaagggatgccttctttgaggtggctttttggagcaaacacagttgtagctacagccgcttctggatagaggctgtggcagaagtttgacgggccctttctttgcttgcaagggatgggatgtgggcttattttcgtatctagggtgggctttggcagctgtgggtataggcgactctcttcttacctacccaataaacttttgtcatgcattgttaaaaaaaaaaaaaaaaaa

SEQ ID NO: 220 - DNA, 4032 bp, Mus musculus
ggcacgagccgggaagagcctgcggccgcgcaggttccgaatgatgactgacgcgggtctgcgcgatagccctcacagcccctggcgttgtgagcgataaggaccctgctcatccagccctgtggctgcaccggctcccggacgctctggagggcgggcggctcccgcgggcgggcggagcggactccagcgccgcttcccacgcgtccggagcggacggagcggacctggctggccgcgcatcgccctcgcctggggccatgaagtagctgcggccgccagccttgccctcccgctggcccggccactgcccgctgccccggtcctgcgcggacatggccggacgcgcccgcagccgcctgctgctgctgctggggctgctcgccttgcagagcagctgcctggccttcagaagcccactttctgtctttaagaggtttaaagaaactaccagatcattttccaatgaatgccttggtaccaccagacccatcactcctattgattcttcggattttacactggatattcgcatgcctggggtcacacctaaagagtctgacacgtacttctgcatgtccatgcgtctgcctgtggatgaggaagccttcgtgattgacttcaagcctcgggccagcatggacactgtccaccatatgctgctgtttggatgcaacatgccctcatccactgggagttactggttttgtgatgaaggaacctgtacagataaagccaatattctatatgcctgggcaagaaatgctccccccacccggctccctaaaggtgttggattcagagttggaggggaaactggaagcaaatacttcgtccttcaagttcactatggggacatcagtgcttttcgagataatcacaaagactgttccggtgtgtccttacatctcacacgtgtgccacagcctttgattgcgggcatgtaccttatgatgtctgtcaacactgttatacccccaggagagaaagtagtgaattctgacatttcgtgccattacaaaatgtatccaatgcatgtgtttgcctaccgagtccatactcaccatttaggtaaggtagtgagtggatacagagtaagaaacggacagtggacgctgattggacgccagagcccccagctgccacaggctttttacccagtggaacacccagtagatgttgcttttggtgatatactggcagccagatgtgtgttcactggtgaggggaggaccgaagccacccacatcggcggcacatctagtgatgaaatgtgcaacttgtacattatgtattacatggaagccaagcatgcagtttccttcatgacctgtacacagaatgtggctccagatatgttcagaactatcccagaagaggccaatattccaattcctgtaaaatccgacatggttatgatccatgggcatcacaaagaaacagaaaacaaagaaaagagtgctttaatacagcagccaaagcagggagaggaggaagccttcgagcagggtgatttctattcactactttccaagctgctaggagaaagggaagatgttgttcatgtgcacaaatataatcctacagaaaagacagaatctgggtcagacctggtagctgagattgcaaacgtagtccagaaaaaggaccttggtcggtctgacgccagagagggagcggagcatgaggaagggggtaatgctatcctggtcagagacaggatccacaaattccacaggctagagtcaaccttgaggccagctgagagcagagctctatccttccagcagcctggtgaaggtccttgggaaccagaactcgcaggagatttccatgtggaagaagcactggagtggcctggagtgtacttgttaccaggccaggtttctggggtggccctggattctaagaataaccttgtgattttccacagaggtgaccatgtttgggatggaaactcttttgacagcaagttcgtttaccaacaaagaggtcttggaccaattgaagaagataccatcctggtcattgacccaaataaagctgaaatactccagtccagcggcaagaatctgttttatttaccgcatggtttgagcatagatacagatggaaattattgggtcacggatgtggctctccatcaggtgttcaaattggaaccacgtagcaaagaaggccctctcttagttctgggaaggagcatgcaacctggcagcgaccaaaatcatttctgccagcccactgatgtggcggtggagcccagtactggagctgtcttcgtgtcagatggttactgcaacagtcggatcgtgcagttctcaccaagcgggaagttcatcactcagtggggagaagagtcttctgggagcagtcctaagccagggcagttcagtgttcctcacagtttggcccttgtgcctcacctgaaccagttgtgtgtggccgatagggaaaatggccggatccagtgtttcaagactgacaccaaagaatttgtgagagagattaagcatgcgtcatttggaaggaatgtctttgcaatctcatatataccaggtttcctctttgcagtaaatgggaagccttactttggagaccaagaacccgtgcaaggatttgtgatgaacttttccagtggggaaattatagatgttttcaaaccagttcgcaagcactttgacatgcctcatgatattgtggcttctgaagatgggactgtgtacattggcgacgcacacacaaacaccgtgtggaagttcaccctcactgaaagcaggctggaagtggagcatcgatcagttaaaaaggctggcattgaggtaccggaaatcaaagaagccgaggcagttgttgaacccaaagtgaagaacaaacccacctcctcagaattgcagaagatgcaggagaaaaagaaactgatcaaagatccaggctcgggagtgcctgtggttctcattacaacccttctggttatccctgtggttgtcctgctggccattgccatgtttattcgatggaaaaaatcaagggcctttggagatcatgaccgaaagctcgagtcgagttctggaagagtactgggaagactccgaggaaagggaagcagcggcttaaatctaggaaatttctttgcaagccggaaaggctacagcagaaaagggttcgaccgagtgagcacagaggggagtgaccaagagaaggacgaagatgatggaagtgagtctgaagaggagtactcgcgtccgctgcccactcctgcaccttcctcctgaactccagccttccttccgtggagctcgagtgagtttacggaggtgcccagattcctttccctttaacgcgtgtaaagttctgtgcatttgattgtaaactgtactcgtccgtgtggaactgtacacaccttagttacttcatttggctccgttggcttgtgtttctaggtgaggagtttcctaccagttcactccagtgccattgtctttatatgaacgtagtgtagagaagctgccctcctcttccatggtagcgctcaaagccctaatggaagtttagctcatttacatttggagacccttttggttttttggttttggttttggtttggtttttttttttttttttttttttttttttttgtggatgtaaatagccctattctctgcttgaacacagtattctcccagtccacacccatgcagtgtctttctttggtgcctttcctgttcagcattctcagcctgtggcagtaaagagaaactttactacacaacaaaaagctgctaaatctccctctatttttttaaaatcactaacattatattgcaatgagagaaattttaaaaagtctctatttaaattctttttttaaatttctcttcagttggtgtgtttccggatgtcttatttttagatggttacactgttagacactatttttcagaatctgaatgtaatttgtgtaataaagtgttttcagagcattaaaaaaaaaaaaaaaaaaaaaaaaaaaaaaaaaaaaaaaaaaaaaaa

SEQ ID NO: 221 - DNA, 8312 bp, Mus musculus
ctcgcacccgctgcgctgcacagggggagaaaaggagcccagggtgtgagccggacaacttctggtcctctccttccatctccttaccggcgtccccacctcaggacttttcccgcaggctgcgaggggacccacagttcgtggccacttgcctcctggggagggcgactctcctcccatccactcaagatgctcaggggtccgggacccgggcggctgctgctgctggcagtcctgtgcctggggacctcggtgcgctgcaccgaagccgggaagagcaagaggcaggctcagcaaatcgtgcagcctcaatccccggtggctgtcagtcagagcaagcctggctgttttgacaatgggaagcactatcagataaatcagcagtgggaacggacctacctaggcaacgccctggtttgtacctgctatggaggaagccggggttttaactgcgagagcaagcctgagcctgaagagacttgctttgacaaatacactgggaacacttacaaagtgggtgacacttatgagcgccctaaagattccatgatctgggactgtacctgcatcggggctgggagaggcaggatcagctgtaccattgcaaatcgctgccatgaagggggtcagtcctacaagattggcgacaagtggaggaggccacatgagactggtggctacatgttagagtgtctgtgtctgggaaatggaaaaggggaatggacctgcaaacctatagctgagaagtgttttgatcatgctgctgggacgtcctacgtcgtgggggagacctgggaaaagccctaccaaggctggatgatggtggactgtacttgtctaggcgaaggcaatggacgcatcacctgtacctccagaaacagatgcaacgatcaggacacccggacatcctataggattggagacacgtggagcaagaaggacaaccgaggaaacctgcttcagtgtgtctgcacaggcaatggcagaggggagtggaagtgtgagcgacatgctctacaaagtgcttcagccggatctggctccttcactgatgtccgaacagctatttaccaaccgcagactcacccccagcccgctccctacggccactgtgtcaccgacagtggtgtggtctactctgtgggaatgcagtggctgaagtcgcaaggaaacaagcaaatgctgtgcacgtgcctgggcaatggcgtcagctgccaggagacagccgtgacccagacttatggtggcaattcaaacggggagccctgtgtcctcccgttcacctacaacggtaggaccttctattcctgcaccaccgaagggcggcaagacggacatctgtggtgtagcacaacttccaattacgaacaagaccagaagtattccttctgcacagaccatgcggttttggttcagactcgaggcggaaattccaatggtgctctgtgccacttccccttcctgtacaacaaccggaattacaccgactgtacttctgagggtcgcagggacaacatgaaatggtgcggcaccacccagaactacgatgccgatcagaagtttggattctgcccaatggctgcccacgaggagatctgcacaaccaatgaaggggtcatgtatcgcattggggatcagtgggataagcagcatgacctgggccacatgatgaggtgcacgtgtgtggggaacggtcgtggagaatgggcctgcatcccctactcccagctccgagaccagtgcatcgttgatgacattacttacaatgtgaacgacacgttccacaagcgtcacgaggagggacatatgctgaactgtacctgctttggtcagggccggggcagatggaagtgtgaccccattgaccagtgccaagattcagagacccggacattttaccagattggtgactcctgggagaagtttgtgcatggtgtccgataccagtgttactgctacggccgtggcatcggggagtggcactgtcaacctctgcagacctacccaggcacaactggacctgtccaagtaattatcacggagacccccagccagcccaattcccaccccatccagtggaatgccccggagccttcacacatcaccaagtacattctcagatggagacctaaaacctctacgggtcgctggaaggaagctaccattcctggccaccttaactcctataccatcaaaggcctgaccccaggtgtgatctatgagggacagctcatcagcatccagcagtatggccacagagaagtgacacgcttcgacttcaccaccagcgccagcacccctgtgaccagcaacacggtgaccggagagactgcgccctactctcctgttgtggccacttctgaatctgtaactgaaatcacagccagcagctttgtggtctcatgggtctcagcctccgacaccgtgtcaggcttccgggtggagtatgagctgagcgaggagggagatgaaccacagtaccttgatctcccaagcacggccacttccgtgaacattcctgacctgctcccgggcagaaagtacattgtcaatgtctatcagatatctgaggagggaaaacagagcttgatcctgtctacctcacagactacagcacctgacgctcctccagaccctaccgtggaccaggttgatgatacttccattgttgttcggtggagtagaccccaggcacctatcacagggtatagaattgtctattcaccttcagtagaaggcagtagcacagagctcaacctccctgaaacggccaactccgtcaccctcagcgacctgcagcccggtgttcagtacaacatcactatctatgctgtggaggagaaccaggagagcacacccgttttcatccaacaagagaccactggcaccccaagatctgataacgtcccccctccgacggacctacagtttgtggaactgactgatgtgaaagtcaccatcatgtggacccctcctgatagtgtggtgtctggataccgtgtggaggtcctgcctgtcagcctgcccggggaacatgggcagaggctgcctgtcaacagaaatacctttgctgaaatcactgggctgtcccctggggtcacgtacctcttcaaagtctttgctgtgcaccagggcagggaaagcaatcctctgacggcacaacagaccaccaaactcgacgctcccactaacctccagtttgtcaatgaaactgacagaacagttctggtaacgtggactccacctcgagcccgtatagcaggctaccgactgaccgcgggcctgacccgaggaggccagcccaagcagtacaatgtgggacccttggcctccaagtatcccctgagaaatctgcagcctgggtctgagtacaccgtgaccttggtggctgtgaaagggaaccagcagagtcccaaagccaccggagtctttactaccctgcagcctctgcgctccattccaccttacaacaccgaggtgacagagaccacaattgtgatcacctggacccccgctccaaggattggcttcaagctgggtgtacgaccgagccagggaggtgaggcaccccgagaagtgacttcagactctgggagcattgttgtgtctggcttgactccaggcgtggaatacacttacaccatccaagtcctgcgagatggccaggagagagatgcaccgattgtcaacagagtagtgacaccgctgtctccaccgaccaacttgcatctggaggcaaaccctgacactggagtgcttactgtctcctgggagaggagcactaccccagatatcactggctacagaataactactacccccacgaacgggcagcaggggacctctctggaagaagtggtccatgctgatcagagttcctgcacttttgagaacctgaatcctggcctggagtacaacgtcagtgtttacactgtcaaagatgacaaggaaagtgcccctatctctgataccgttgtcccagaggtgccccagctcactgacctaagctttgttgatataactgattcaagcatcggcctgaggtggaccccgctaaactcttccaccattatcgggtaccgaatcacagtagttgcggcaggagaagggatccctatttttgaagattttgtggactcctcagtaggatactacacagttacagggctggagcctggcattgactatgacatcagcgttatcactctcattaatggcggagagagtgcccctactacactgacacagcaaacggctgtccctcctcccacggatctgcgattcaccaatatcggtccagacacgatgcgggtcacttgggccccgcctccgtccatcgagctgaccaacctcttggtgcgctactcacccgtgaagaatgaagaggacgttgcagagctatccatttcaccttcagacaatgccgtggtcctaacaaatctcctgcctgggacagaatacttagtcagtgtctccagtgtctacgaacaacatgagagcatccctctccggggaaggcagaaaacaggtctcgattccccaactggttttgattcttctgatatcaccgccaactcattcactgtccactgggtggctcctcgggcccccatcaccggctacatcatccgccatcacgccgagcattctgtcggaagacccaggcaggatcgagtgccgccctcgcggaattccatcaccctcaccaaccttaatccgggcaccgagtacgttgtcagcatcattgctgttaatggcagagaggagagcccgccactgattggccagcaagccacagtttctgatattccgagagatctggaggtcattgcctccacccccaccagcctgctcatcagttgggaaccccctgccgtctctgtgcgctattacagaatcacctacggagagacaggaggaaatagccctgtccaggagttcactgtgcccggaagcaagtccacagccaccatcaacaacattaaaccaggagcagactacaccatcaccctgtatgctgtcactggccgtggggacagtccagcaagcagcaagccagtttccatcaattataaaacagaaattgacaagccgtcccagatgcaggtgacagatgtccaggacaacagcatcagtgtcaggtggctgccttcaacttctcctgtgacaggctacagagtgaccaccactcccaaaaatggcctaggaccatcaaaaactaaaactgccagtccagatcaaacagaaatgaccattgaaggtttgcaacccactgtggagtacgtggttagtgtttatgctcagaaccggaacggagaaagccagcccctggttcaaactgcagtgaccaacattgatcgccctaaaggactggcattcactgatgtggatgtcgattccatcaaaattgcttgggaaagcccacaggggcaagtttccaggtacagggtgacctactcgagccctgaggatggaatccgggagcttttccctgcacctgatggtgaagacgacactgcagagctgcagggcctcaggccggggtctgagtacacagtcagtgtggttgccttgcacgatgatatggagagccagcccctgattggaatccagtccacagccattcctgcgcccaccaatctgaagttcagtcaggtgacacccaccagctttactgcccagtggatagcacccagtgttcagctcactggctaccgggtgcgggtgaacccgaaagagaagacaggaccaatgaaagaaatcaacctttctccagacagctcatcggtgattgtgtcaggactcatggtggccactaaatacgaagtcagtgtctatgctctcaaggacacactgacaagcagaccagcccagggagtcatcactactctggagaatgttagccctccaagaagggcccgtgtgacggacgctacagagaccaccatcactattagctggagaacaaagacagagacaatcactggcttccaagtcgatgccatcccagccaatggccagaccccagttcagaggagcatcagcccggatgttagaagctacaccattacaggtttacagccaggcactgactacaagatccacctgtacactctgaacgacaatgcccggagctcgcccgtgatcatcgatgcctccaccgccatcgacgcaccatccaacctgcggttcctgaccaccacacccaactccttgctggtgtcatggcaggcgccccgtgccaggattactggctacattatcaagtatgagaagcctggatcccctcccagagaagtggtccctcggccccgccctggtgtcacggaggccaccattactggtctggagccaggaaccgagtacaccatctacgtcattgccctgaagaacaatcagaagagtgagcccctgattgggaggaagaagacagatgagcttccccaactggttacccttccacaccccaatcttcatggaccagagatcttggatgttccctccacagttcaaaagacccccttcatcaccaaccctgggtatgacaccgaaaatggtattcagcttcctggcacaacccaccagcaacccagtgttgggcaacaaatgatctttgaggaacatggctttaggcggacaacgccacccactgcggccacccccgtcaggcttaggccaagaccatacctgccgaatgtagatgaggaggtccaaatcggtcatgttcccaggggagacgtagactaccacctctatcctcatgttccgggcctcaatccaaatgcctctacaggacaggaagctctctctcagacaaccatctcttggacgccgttccaggagagttctgagtacatcatttcatgccaaccagttggcaccgacgaagagcccttacagttccaagttcctggaacttctaccagtgcgactctgactggccttaccagaggggtcacctacaacatcatagtggaggcactgcagaaccagaggaggcacaaggttcgggaagaggttgtgactgtgggcaacgctgtcagcgaaggcctgaaccagcctacagatgactcatgctttgacccttacacggtttcccattacgccattggagaggagtgggagcggttgtctgacgctggctttaagctcacatgccagtgcttgggctttggcagtggtcatttcagatgcgattcatctaaatggtgccatgacaacggtgtcaactacaagatcggagagaagtgggatcggcagggagaaaatggccagcggatgagctgcacatgcctcgggaatggaaagggagaattcaagtgtgatccccatgaagcaacgtgctatgacgatgggaagacctaccatgtaggagaacagtggcagaaagaatatctcggagccatttgctcctgcacgtgtttcggaggccagcggggctggcgctgtgacaactgccgtagacctggggctgctgaacccagtcccgatggcaccaccggccacacctacaaccagtatacacagagatacaatcagagaacaaacactaacgtaaattgccccattgagtgcttcatgccgctagatgtgcaagctgacagagacgattctcgagagtaatctttccagccccaccctacaagtgtctctctaccaaggtcaatccacaccccagtgatgttagcagaccctccatctttgagtggtcctttcacccttaagccttttgctctggagccatgttctcagcttcagcacaatttacagcttctccaagcatcgccccgtgggatgttttgagacttctctcctcaatggtgacagttggtcaccctgttctgcttcagggtttcagtactgctcagtgttgtttaagagaatcaaaagttcttatggtttggtctgggatcaatagggaaacacaggtagccaactaggaggaaatgtactgaatgctagtacccaagaccttgagcaggaaagtcacccagacacctctgctttcttttgccatctgacctgcagcactgtcaggacatggcctgtggctgtgtgttcaaacacccctcccacaggactcactttgtcccaacaattcagattgcctagaaatacctttctcttacctgtttgttatttatcaatttttcccagtatttttatacggaaaaaattgtattgaagacactttgtatgcagttgataagaggaattcagtataattatggttggtgattatttttataagcacatgccaacgctttactactgtggaaagacaagtgttttaataaaaagatttacattcc

SEQ ID NO: 222 - DNA, 4711 bp, Mus musculus
ctcgggacggagcaggaggcacgcggagtgaggccacgcatgagccgaagctaaccccccaccccagccgcaaagagtctacatgtctagggtctagacatgttcagctttgtggacctccggctcctgctcctcttaggggccactgccctcctgacgcatggccaagaagacatccctgaagtcagctgcatacacaatggcctaagggtccccaatggtgagacgtggaaacccgaggtatgcttgatctgtatctgccacaatggcacggctgtgtgcgatgacgtgcaatgcaatgaagaactggactgtcccaacccccaaagacgggagggcgagtgctgtgctttctgcccggaagaatacgtatcaccaaactcagaagatgtaggagtcgagggacccaagggagaccctggcccccaaggcccaaggggacccgttggcccccctggacgagatggcatccctggacagcctggacttcctggtcctcctggtccccctgggccccccggaccccctggccttggaggaaactttgcttcccagatgtcctatggctatgatgaaaaatcagctggagtttccgtgcctggccccatgggtccttctggtcctcgtggtctccctggcccccctggtgcacctggtccacaaggtttccaaggcccccctggtgaacctggcgagcctggcggttcaggtccaatgggtccccgaggtccccctggccctcctggcaagaatggagatgatggggaagctggcaagcccggccgtcctggtgagcgtggacctcctggacctcagggtgctcgtggattgcctggaacagctggcctccctggaatgaagggacaccgaggcttcagtggtttggatggtgccaaaggagatgctggtcctgctggtcctaagggagagcccggcagtcctggtgaaaacggagctcctggccagatgggtccccgaggtctgcccggtgagagaggtcgccctggacctcctggcactgctggtgctcgcggtaacgatggtgctgttggtgctgctggaccccctggtcccaccggccccactggccctcctggcttccctggtgcagttggtgctaagggtgaagctggtccccaaggagctagaggctctgaaggtccccagggtgtgcgtggtgagcccggaccccctggccctgctggtgctgccggccctgctggaaaccctggtgctgatggacaacctggcgctaaaggtgccaatggtgctcctggtattgctggtgctcctggcttccctggtgcccgaggcccctctggaccccagggccccagcggccctccaggtcccaagggtaacagtggtgaacctggtgctcctggcaacaaaggagacactggtgccaaaggagaacccggtgctactggagttcaaggtcccccaggccctgccggagaagaaggaaaacgaggagcccgtggtgagcctggaccttccggactgcctggacctcctggcgagcgtggtggacctggtagccgtggtttccctggtgctgatggtgttgctggccccaagggtccttccggtgaacgtggtgctcccggacctgctggtcccaaaggttctcctggtgaagctggtcgccccggtgaagctggtctccctggtgccaagggtctcactggcagtcctggcagccctggtcctgatggcaaaaccggcccccctggtcccgctggtcaagatggtcgccctggacccgcaggtcctcctggagcccgtggccaggctggtgtgatgggattccctggacctaagggtaccgctggagaacctggaaaggctggagagcgaggccttcccggaccccctggcgctgttggtcctgctggcaaagatggagaagctggagctcagggagcccctggccctgctggtcctgctggtgagagaggtgaacaaggtcccgctggctcccctggattccagggtcttcctggtcctgccggtcctcctggtgaagcaggcaagcctggtgaacagggtgttcctggagaccttggtgcccctggaccctctggcgcaagaggcgagagaggtttccctggtgaacgtggtgtacaaggtcccccaggtcctgctggtccccgaggaaacaatggtgcccccggcaacgatggtgccaagggtgatactggtgcccccggagctcccggtagccagggtgcccccggtcttcagggaatgcctggtgaacgtggtgcagctggtcttccaggtcctaagggtgacagaggtgatgctggtcccaaaggtgctgatggttctcctggtaaagatggtgcccgtggtctgactggtcccattggtcctcctggccctgctggtgcccctggtgacaagggtgaagctggtcccagtggtcctcccggtcccaccggagcccgtggtgctcccggagaccgtggtgaggctggtccccctggtcctgctggctttgccggcccccctggtgctgatggccaacctggtgcgaaaggtgaacctggtgatactggtgttaaaggtgatgctggtcctcctggccctgctggtcctgctggaccccccggccccattggtaacgttggtgctcctggacccaaaggtcctcgtggtgctgctggtccccctggtgctactggcttccctggtgctgctggccgtgtcggtccccctggtccctctggaaatgctggaccccctggccctcccggtcccgttggcaaagaagggggcaaaggtccccgtggtgagactggccctgctggacgtcctggtgaagttggtcccccaggtccccccggtcctgctggtgagaaaggatctcctggtgctgatggacctgctggctctcctggtacccctggacctcagggtattgctggacaacgtggtgtggtcggtcttcccggtcagagaggagaaagaggcttccctggtcttcctggcccctctggtgaacctggcaaacaaggtccttctggatcaagtggtgaacgcggtccccctggccccatggggccccctggattggctggtccccctggtgaatctggacgtgagggatcccctggtgctgaaggctcccctggaagggatggtgctcccggggccaagggtgaccgtggtgagactggccctgctggcccccctggtgcccctggtgctcccggtgctcccggccctgttggtcccgctggcaagaatggcgatcgtggtgagactggtcctgctggtcctgctggtcccattggccctgctggtgcccgtggccctgctggaccccaaggcccccgtggtgacaagggtgagacaggcgaacaaggtgacagaggcataaagggtcatcgtggcttctctggtctccagggtcctcctggttctcctggttctcctggtgaacaaggcccctctggagcttcaggtcctgcaggcccccggggtccccctggctctgctggttctcctggcaaagacggactcaacggtctccctggccccattggtccccctggtcctcgaggtcgcactggtgacagcggccctgctggtccccccggccctcctggaccccctggccctcctggacctcccagtggcggttatgacttcagcttcctgcctcagccacctcaagagaagtctcaagatggtggccgctactaccgggccgatgatgctaacgtggttcgtgaccgtgaccttgaggtggacaccaccctcaagagcctgagtcagcagattgagaacatccgcagccccgaaggcagccgcaagaaccctgcccgcacatgccgcgacctcaagatgtgccactctgactggaagagcggagagtactggatcgaccctaaccaaggctgcaacctggacgccatcaaggtctactgcaacatggagacaggtcagacctgtgtgttccctactcagccgtctgtgcctcagaagaactggtacatcagcccgaaccccaaggaaaagaagcacgtctggtttggagagagcatgaccgatggattcccgttcgagtacggaagcgagggctccgaccccgccgatgtcgctatccagctgaccttcctgcgcctaatgtccaccgaggcctcccagaacatcacctatcactgcaagaacagcgtagcctacatggaccagcagactggcaacctcaagaaggccctgctcctccagggatccaacgagatcgagctcagaggcgaaggcaacagtcgcttcacctacagcacccttgtggacggctgcacgagtcacaccggaacttggggcaagacagtcatcgaatacaaaaccaccaagacctcccgcctgcccatcatcgatgtggctcccttggacattggtgccccagaccaggaattcggactagacattggccctgcctgcttcgtgtaaactccctccaccccaatctggttccctcccacccagcccacttttccccaaccctggaaacagacgaacaacccaaactcaatttcccccaaaagccaaaaatatgggagataatttcacatggactttggaaaacattttttttcctttgcattcacctttcaaacttagtttttacctttgaccaactgaacgtgaccaaaaaccaaaagtgcattcaaccttaccaaaaaagaaaaaaaaaaaaaaa

SEQ ID NO: 223 - DNA, 1665 bp, Mus musculus
ctagtctgactctcaagaacacagttcagcgacacgcttgccctgagatcatgtctcttcgcctttccagtggatccaggaggtcctatgctcgccccagcacagggtcgctcaggggagccagcttcggagctggaaatgcatgtggcgtggcaggcattggaagtggcttctcctgcgccttcgggggcagctccacaggaggaaacacgggggtggccaactcctgtgctggcttcactgtgaatgagggggggctcctctccggcaatgagaaggtgaccatgcagaaccttaatgaccgcctggcctcctacctggacaacgtgcaagcgctgcaggaggccaacgctgacctggagcagaagatcaagggctggtatgaaaaatttggacctgggtcgtgccgcggtctcgatcatgactacagtagatacttccccatcattgatgatctaaaaaaccagatcatcacctccaccaccagcaacgccaacgctgtactgcagattgacaatgccaggctcacggctgatgacttcagactcaagtacgaaaacgagctggctctccaccagagcgtagaggctgacgtcaacgggctgcgcagagttctggatgaaatcaccctgtgccgcactgacctggagattcagtacgaaaccctgagcgaggagctgacctatctcaagaagaaccacaaagaggaaatgcaggctctgcagtgcgccgctggaggcaacgtgaacgtggagatgaacgcagccccgggcgtggacctcaccgtcctgctgaacaacatgagagctgagtatgaggccctggctgagcagaaccgcagggacgctgaggcctggttccaagagaagagtgcttcgctgcagcagcagatcaccgaggacgtgggtgccaccacctcagccaggaatgagctcaccgaaatgaagcgaacgctccaaaccctggagattgaactgcagtctctcctggccacgaaacactctctggagtgctccctgacggagaccgagggcaactactgcacgcagctggctcagatccaggctcagatcagcgccctggaggagcagctgcaccaggtgaggacggagaccgagggccagaagctggaatatgagcagctgctgaatgtcaaggcccacctggagaaggagatcgagacctactgcctcctcataggaggagatgaaggggcctgtaagtcttcgagttacaagtctaaagattatggatctggaaacgccggaaaccaaatcaaagatccagtcaaagccatagtggttaagaaggttctagaggaggtggatcagcgcagcaagatactgaccactaggctccactccctggaagagaaatctcaaagcaattagcaaagatcatgagcaaaagaagaagaagaaaagcttcaaagaagacaaggcatgcaatgtgtctgggaaatgagcaagcctatggaaaaaaaaatgtctgtcctgttgtcttctgttcctttctccttctgagccagcagcggcagaactccccgtccatctggagggaagtcacttgcaaacgtgagggctcacctgattaccctacagccatctgtcagcatttctttacagtcaataaaccttccttgagcaacttaaaaaaaaaaaaaaa

SEQ ID NO: 224 - DNA, 1535 bp, Mus musculus
ggggggggggggggggggggggggctttccttgctccttatgagaggtggagaggtagaaaaggcacacaaatattgactcactgaaattttctctgagatgtagaaagattccataaattattggtgacttggtggtgatctagtggtgccaagagtgtgtttgaacctgacaagacatcaactgtgcctcataaaatatgttgcaggactaactacgaccatgagattggcagtgatttgcttttgcctgtttggcattgcctcctccctcccggtgaaagtgactgattctggcagctcagaggagaagctttacagcctgcacccagatcctatagccacatggccggtgcctgacccatctcagaagcagaatctccttgcgccacagaatgctgtgtcctctgaagaaaaggatgactttaagcaagaaactcttccaagcaattccaatgaaagccatgaccacatggacgacgatgatgacgatgatgatgacgatggagaccatgcagagagcgaggattctgtggactcggatgaatctgacgaatctcaccattcggatgagtctgatgagaccgtcactgctagtacacaagcagacactttcactccaatcgtccctacagtcgatgtccccaacggccgaggtgatagcttggcttatggactgaggtcaaagtctaggagtttccaggtttctgatgaacagtatcctgatgccacagatgaggacctcacctctcacatgaagagcggtgagtctaaggagtccctcgatgtcatccctgttgcccagcttctgagcatgccctctgatcaggacaacaacggaaagggcagccatgagtcaagtcagctggatgaaccaagtctggaaacacacagacttgagcattccaaagagagccaggagagtgccgatcagtcggatgtgatcgatagtcaagcaagttccaaagccagcctggaacatcagagccacaagtttcacagccacaaggacaagctagtcctagaccctaagagtaaggaagatgataggtatctgaaattccgaatttctcatgaattagagagttcatcttctgaggtcaactaaagaagaggcaaaaacacagttccttactttgcatttagtaaaaacaagaaaaagtgttagtgagggttaagcaggaatactaactgctcatttctcagttcagtggatatatgtatgtagagaaagagaggtaatattttgggctcttagcttagtctgttgtttcatgcaaacaccgttgtaaccaaaagcttctgcactttgcttctgttgttcctgtacaagaaatgcaacggccactgcattttaatgattgttattctttcatgaataaaatgtatgtagaaataagtaaatttactgaaacaagcaagaattaaaagagaaactgtaacagtctatatcactatacccttttagttttataattagcatatattttgttgtgatttatttttttttgttggtgtgaataaatcttgttaacg

SEQ ID NO: 225 - DNA, 757 bp, Mus musculus
gagagtactggggacttccaagatacctcaccttattatctgtcctgtggtttctgggggtgctctgtaaagatgtcctggagacgggtcattctcctgtcatctctcttggccctggtgctcctgtgtagtgtgaaacagaagattttcatgcaagaatctgatgcctccaatttcctcaagaggcgtggcaagcggtctcctaagtcccgagatgaagttaatgcggaaaacagacagaggctgcgggatgatgagctgcggagggagtattacgaggagcaaaggaacgagtttgagaacttcgtggaggaacagagagatgagcaggaagagaggacccgggaggctgtggagcagtggcgccagtggcattatgatggcctttatccttcctacctctacaaccgccaaaacatctgacctcattaaagcaaccggggaagagaagcatgtgacaggcctgccacctctccacagacggacccacaaggtgaagctccctcaccgccctggtcaacagctccaggaaagacaccctctgttctgatgccttctgatgcgtggcttttgcttctttatggatgtttgttttgttttgtttttgagtgagcaaccatctgtggttcttcccagcacctgcccccttgcttagccaccagaaacagaatcagagcacccatctgatagacactttcaggatcgaagcataaaggttttaagcttgcttatggcctattaataaaagtgccgaatc

SEQ ID NO: 226 - DNA, 1751 bp, Mus musculus
acatcagcatcacctccttccctcactcatcttccctggtgcttcagggttccccttctccttaaacaagatgtctcaccagaaaaagcagcccactccctgccctcctgtgggttgtggaaagacctctggtggaggaggaggcggcggcggctattatagcggtggcggctctggctgcggaggcggctcatctggaggaggctctagctgtggaggcggaggcggtggttcctatggaggtggttccagctgcggcggtggaggcggctccggtgggggcgtcaagtactccggaggcggcggtggctctagctgcggcggcggctactccggaggcggtggtggctctagctgcggcggtggctactctgggggcggcggcggctccagctgcggaggtggctactccggaggcggcggcggctccagctgcggcggcggcagctactccgggggtggctccagctgtggaggcggtggcggctctggtgggggcgtcaagtactccggaggtggtggcggcggcggctctagctgcggcggcggctcctccgggggcggcggcggcggctccagctgcggaggcggatcaggaggcggcggctcctactgcggaggctcctctggaggcggcagctccggtggctgcggcggcggttccggaggcggcaagtactctggtggcggcggtggctccagctgcggaggcggctattccggcggcggtggaagcagcggcggctctagctgtggcggcggctactcaggtggcggtggatccagctgcggcggcggcggcggctattccggtggcggcggcacgagctgcggaggtggttcctccggtggcggcggcggcggatcgtcccaacagtatcagtgccagagctacggaggcggttctagcggtggctccagctgcggcggcggctactccgggggcggaggctccagctgcggtggcggctactccgggggcggaggctctagctgcggaggcggctcctctggtggtggctccagttgcggcggcagcggcggcggcggctattccggtggtggcggtggcagctgcggcggcggctcctctggcggcggagggggctattactcctctcagcagaccagtcagacctcctgcgccccccagcagagctacggagggggctcttccggaggaggtggtagctgtggaggtggctcctctggcggcggtggcggcggtggctgctactccagcggtggtggcggcagcagcggtggctgcggtggaggctactccggaggcggcggtggctgtggcggcggctcttccgggggcagcggcggtggctgcggaggtggctcttccggaggcagcggcggtggctgcggaggaggctactccggaggcggaggcggtggctccagctgcggaggcggctcctctggtggcggctctggaggtggcaagggtgtgccagtctgccaccagacccagcagaagcaggcgcctacctggccgtgcaagtaaggtcaccgggttgcaacggagacaacagagctggaagagttctccgtgggcgccgatgggcttaactttctcatgaatttgcctgaggtttccaaacccttcacattttaagcgccccttcccccagaagaagccattgagtcgctcaaggtgtatcctgttctgcagatttttcatcttggtttctgaatgactacctcccaattctagtgtctcctcagtcaataaatttgct

SEQ ID NO: 227 - DNA, 1748 bp, Mus musculus
ccacgcgtccgcggacgcgtgggtcgacccacgcgtccggcccaggctcaaggcgttccaaccatggcccgcgcgctcttattcagtctggtctttcttgccatcctcctgcctgcgctggccgcctgcccccaaaactgccactgccatggagatctgcagcatgtcatctgcgacaaggtggggctgcagaagatccccaaggtatcagagacaaccaaactgctcaatctccagcgcaacaacttcccggtgctggctgccaactcgtttcggaccatgccgaacctggtctccctgcacctgcaacactgcaacatccgcgaggtggcggctggtgccttccgaggcctgaagcagcttatctacctgtacctgtcccacaacgacatccgggtattgcgagctggagccttcgacgacctgactgaactcacttacctctatctagaccacaacaaagtgtcggaactgccccgggggttgctctctcctctggtcaacctcttcatcttgcaactcaacaacaacaaaatccgagagctgcgtgctggagctttccagggggccaaggacctgcgctggctctacctgtcagaaaatgccctcagttccctgcagcctggttccctggatgatgtggagaacctagccaagttccacctggacaagaaccagctgtctagctacccctcagccgccctgagcaaacttcgggtggtggaggagctgaagctgtctcacaaccctctgaagagcatcccagacaatgccttccagtccttcggtagatatctggagaccctctggctggataacaccaacctggagaagttctcagatgctgccttctcgggtgtgaccacactgaaacacgtccatctggacaacaaccgcctgaaccaactgccttcctccttcccctttgacaacctggagaccctcactctcaccaacaacccatggaaatgcacctgccagctccgtggccttcggcggtggttggaagccaaggcttctcgaccggatgctacctgctcctcgccagccaagttcaagggtcagcggattcgtgacacagatgcccttcgcagctgcaaatccccgaccaagaggtccaagaaagctggccgccattaaacaggtcctgatccagccagtcctggcgactgccttccgctggagagactactgacgttccctcccatcatccacaccttctcctacagcctctgcggatgcacagcgctgccccgcccccgcccccacctaggtacatcctggcaggggcactgggctctctatcaccatcccagctccacccagtggggtcctaggaaagacacagaatccctccccagccactgtgtctgggctctgccatggctcctttgagagaagctattgtagaacctcctaccctctgtccatcggagctaaagcgcagtggtcattgggatgaccacgttattaccaccttcctcggttccctctgtccctgccatttggaaacaaacatcaggcccctgacccaccctgattgccagaaagaatttcaggcccatgccccaactctgccagttcctgcctgccaggacatgctaccaggataccagtagcgcttggctgcatatccttcctgtttgcgctccagatttctataaacataaatgtatgtgtgttcaacattcaaaaaaaaaaaaaaaaaaaaaaaaaaaaaaaaaaaaaaaaaaaaaaaaaaaaaaaaa

SEQ ID NO: 228 - DNA, 4270 bp, Mus musculus
ctgcgcccgccaggtgatacctccgctggtgacccaggggctctgcaacacaaggagtctgcatgtctaagtggtagacatgctcagctttgtggatacgcggactctgttgctgcttgcagtaacttcgtgcctagcaacatgccaatatttgcaatcgggatcagtacgaaagggccccactggagacagaggaccacgtggacaaaggggtcccgcaggtccccgaggcagagatggtgttgatggtcccatgggccctcctggtccccctggctcccctggtcctcccggctcccctgccccccctggtcttactgggaactttgctgctcagtattctgacaaaggagtttcatctggccctggaccaatgggtttaatgggacccagaggccctcctggtgctgttggagcccctggccctcaaggtttccaaggacctgctggtgaacctggtgagcctggtcaaacgggtcctgcaggtccccgtggtccagctggctctcctggcaaggctggtgaggatggtcaccctggaaaacccggaagacctggggagagaggagtcgttggaccacagggtgctcgtggtttccccgggactcctggacttcctggcttcaaaggcgtgaaaggacacagtggtatggatggattaaagggacagcctggtgcacagggtgtgaagggtgaacccggtgcccctggagagaatggaactccaggtcaagcaggagcccgagggcttcctggtgagagagggcgtgtcggagctcctggtccagctggtgcccgaggcagtgatggaagcgttggccccgtcggccctgctggtcccattgggtctgctggaccccctggtttcccaggtgctcctggtcccaagggtgaacttgggcccgttggtaaccctggccctgctggtcctgctggtccccgtggtgaagtgggtcttccaggtctttctggccctgttggacctcctggcaaccctggaacaaatgggctcactggcgccaagggtgctactggactccctggtgtcgctggggctcccggtctccctggcccccgtggtattcctggccccgctggtgctgctggtgctacaggtgccagaggacttgttggtgagcctggtcctgctggctccaaaggagaatccggtaacaagggtgagcctggctctgttggagcccaaggtcctcctggtcccagcggtgaagaaggaaagagagggtctcccggagaagctggatctgctggccctgcagggcctccagggcttagaggcagcccaggttctcgaggtcttcctggagctgatggcagagctggtgtaatgggtcctcctggcaatcgtggttcaaccggccctgctggaatccgaggtcctaatggagatgccggtcgacctggggaacctggtctcatgggacccagaggtcttcctgggtctcctggaaatgttggcccatctggtaaagaaggccctgtgggtctccctggcattgatggcagacctggcccaatcggcccagctggaccaagaggtgaagctggcaacatcggattccctggacccaaaggcccctctggtgatcctggcaaacctggtgagagaggacaccccggtcttgctggtgctcggggagctccaggacccgatggcaacaatggagctcagggcccccctggaccccagggtgttcaaggtggcaaaggtgaacaaggccctgctggtcctcctggcttccagggtctcccaggtccctcaggtactactggagaagttggcaagcccggagaaaggggtcttcctggtgaattcggtctccctggtcctgctggtccaagaggagaacgtggtaccccgggtgagagtggagctgctggcccttctggtcctattggaagccgaggtcccagtggagccccagggcctgatggaaacaagggtgaagctggtgcagtcggtgctccaggcagtgctggtgcctctgggcctggtgggcttccaggagagaggggtgctgctggcatacctgggggcaaaggagaaaagggtgaaactggtctccgaggtgacactggcaacactggtagagatggtgctcgtggcattcctggtgctgtaggtgcccctggtcctgctggggcctcaggtgaccggggtgaagctggtgctgccggtccttctggcccagctggtcctcggggtagccctggtgaacgtggtgaagttggccctgctggccccaatggatttgctggtcctgctggtgctgctggccaacccggtgctaaaggagagaagggaaccaaagggcctaagggtgaaaatggcattgttggtccaaccgggtctgttggagctgctggcccatctggtcctaatggcccacctggtcctgttggaagtcgtggtgatggagggccccctggtatgactggcttccctggtgctgctggacggactggtccccccggacccagtggtattgctggcccccctggcccccctggtgctgctggaaaggaagggattcgtggtccccgtggcgaccaaggtccagttggccgaactggagaaacaggtgcatctggaccccctggatttgttggtgaaaagggtccctctggagaacctggtaccgcaggagcccctggtaccgcaggtcctcagggtcttcttggtgctcccggtattctgggtctccctggctctagaggtgaacgtggtctgccaggtattgctggtgctctgggtgaacctggtcctctgggcatctcaggccctcctggtgcccgtggtccccctggtgccgtgggcagccctggagttaatggtgcccctggtgaagctggtcgtgatggtaaccctggcagcgatggtcccccaggtcgtgatggtcagcctggacacaagggagagcgtggttaccctggcagcattggtccgactggtgctgcaggtgcccctggtcctcacggttctgtgggtcctgctgggaaacatggaaaccgaggtgaacctggtcctgccggttctgttggtcctgttggtgctgttggtccaagaggtcctagtggtcctcaaggcatccgaggtgacaaaggagaacctggtgataaagggcacaggggtcttcctggcttaaaaggatacagtggattgcagggtcttcctggtcttgctggcctacatggtgaccaaggagctcctggtcctgtgggtcctgctggtcccaggggtcctgctgggccttctggacccgttggcaaagatggtagatctgggcaacctggcccagtcgggcctgctggtgttcgtggttctcagggtagccaaggtcccgctggtccccctggtccccctggacctcctggtcctcctggtgtcagcggaggtggctatgactttggttttgaaggagacttctacagagctgaccagcctcgctcccagccttcactcagacccaaggactatgaagttgatgcaactctgaaatctctcaataaccagattgagacccttctcactcctgaaggctctagaaagaaccctgctacgacaacgtgccgggacttaagactcagccacccagagtggaacagcgattactactggattgaccctaaccaaggatgtactatggatgccatcaaagtgtactgtgatttctctactggtgaaacctgcatccaggcccaacctgtaaacaccccagcgaagaactcatacagccgcgcccaggccaacaagcatgtctggttaggagagactatcaatggtggcagccagtttgaatacaacgtagaaggggtgtcctccaaggaaatggcaactcagctcgccttcatgcgcctgctagccaaccgtgcttctcagaacatcacctaccactgcaagaacagcattgcgtacctggatgaggagacgggcagcttgaacaaggctgtgcttctgcagggttccaacgatgttgaacttgttgctgagggcaacagcaggttcacctactctgtcctagtcgatggctgctccaaaaagacaaatgaatggggcaagacaatcattgaatacaaaacaaataagccatctcgcctgccgttccttgacattgcacctctggacattggtggtgctgaccaagaattccgtgtggaggttggccccgtctgtttcaaataagtgaactcaacctaaattaaaaaccaaaaacccctgaaaaaaggtttctctttgccgtttcctccttta

SEQ ID NO: 229 - DNA, 1914 bp, Mus musculus
ccacgcgtccgcggacgcgtgggtgtgtccagtcactgagcagaggccaactagtgtttcttcatctccctgggaaaagcagcagacaggatggcctggtggaaagcctgggttgaacaggagggcgtcagcgtgaagggtagttctcatttcaacccagaccctgatgcagagaccctctacaaagccatgaaggggattggaaccaatgagcaggccatcatagacgtgctcaccaagaggagcaatgtgcagaggcagcagattgccaagtccttcaaggctcaatttggaaaggacctcactgagaccttaaagtcagagctgagtggcaaatttgagagactcatcgtggccctcatgtacccgccatacagctacgaggccaaggagctgcacgatgccatgaagggcttaggaaccaaagaaggagtcatcattgagatcctagcttctcggaccaagaaccagctgagagagataatgaaggcatatgaggaagactatggatctaccctggaagaagacatccaaggagacacgagtggctatctggagcggattctggtgtgtctcctgcagggcagcagagatgatgtgagcggctttgtggatccaggactggtcctccaagatgcacaggccctgcatgaagcgggtgagaagattatgggaaccgatgagatgaagttcatcactatcctgtgcacacgcagtgccactcacctgatgagagtgttcgaggaatatgaaaaaattgccaacaagtgcattgaggatagcatcaagagtgagacccatggttcgctggaggaggccatgctcactgtggtgaaatgcacccggaacgtccacagctactttgcagagagactctactacgccatgaagggagcagggacacgtgatggaacgctgataaggaacattgtttccaggagtgagattgacttaaatcttatcaagggtcagtttaagaagatgtacggcaagactctcagcagcatgatcatggccgacaccagtggttactacaagactgccctgctgaaccttgtgggcactgacctctgaaaatgtcaaaaaatagaacaagggcaagaagtgtgagcccagcccctgcagcttcagccccgaccatgggtgggggtaggggacacctcatctggcttttagtcttctgttgcccagtttctgatgcttctcatcccatgcttctgacccggatgatgagaccagcctgggtttcccttccacctctcccgtcagtcatttctaggtatgtgtataccgcccaccctagcattacctctgagcaaacggaaacatcaacatgaagaaagaagcttgcagtgtcctgtgggtcattccttccccttcacacaaaatctcctgggcacagggcacacagatgccttggctctgacccatctactgagtcagggtcttcagaggaagaaccaaggaacatggatttctagcagttgtcttagctgctaagcatcattatcaggcagccagtgagcatgtgggagagcacctctatgagaggacacggccgtggatctgagaaagggtcacatagctctgccaatcgggacactcacttaacggaaattgttaggctctaggtggaggaaaattcttacaccatcctaatagcacgcattagatgggattacaaatccccgtcctgacccaagtacgctgtggtctgagaaactcgggcttgtccagtcattccctccatgctgaagcttgcagactagggagccgcccagccctgagcatgaatcccatcctctgatcgtggtctccgagcctgaagaacatgacagaactcttctcaatattcgttgggctttcagaatcataaacatttgtactttcaaaaaaaaaaaaaaaaaaaaaaaa

SEQ ID NO: 230 - DNA, 195 bp, Mus musculus
tgtcccaggagcctggggttttgagtgctccttcggccaaggacactgatagtgccccagccagtcatgcattagacgctcctgctgaaaagactttgccaaaatccaagaggaaacgcaagtgcgacaacgaagatgactacagggagataaagaaggtccagggaaggaaggagagtgcctcacgcctcgccg

SEQ ID NO: 231 - DNA, 2162 bp, Mus musculus
ggaaagagttccatttcagaatctctagctttaagaaaggctaagcaagcacacagaggaaggagatcacggggaaggaagaaaactgccagtgtgggtcagagaaagaagcttcctacttctccagggacagactctaaggggaacaggcctgcacaccatgctgagggagacctggctatgtgttatccttgtagcctttgtcagccacccagtgtggctgcagaagcctcataaacgcaagacacagctcaaagcagcgggctgctgtgaggagatgagggagctcaaagcccaggtggccaacctcagcagtctgctgggagagctgagcaggaagcaggagagcgactgggtcagtgtggtcatgcaggtgatggagctggagagcagcagcaagcacatggagtctcggctcagcactgccgagagcaagtactctgagatgaacaaccagattgacatcatgcagctgcaggctgcgcagaccgtcacgcagacctcggcagatgccatctatgactgttcttccctgtaccagaagaactaccgaatctctggagtgtacaagcttcctcctgacgagttcctggggagccctgagctagaggtgttctgtgacatggaaacttcaggaggaggctggaccatcatccagagacgtaagagtggccttgtctccttctaccaagactggagacagtataagcaagggtttggcagcatccgaggtgacttctggctggggaatgaacatatccaccggctcaccaggcagccaagccggcttcgtgtggagctggaggactgggagggcaatgcacgctacgcagagtatagctactttgcgttgggcaatgaactgaacagctaccgcctcttcctggggaactacagtggcaacgtggggaaggacgccctcctctaccataacaacaccgtcttcagcaccaaggacaaggacaacgacaactgcttggacaagtgcgcacagctccgaaaaggtggctactggtacaactgctgcacagactccaacctcaatggggtgtactaccgccttggcgagcaccgaaagcacatggatggcatcagctggtatggctggcatggagccaactattccctcaaacgtgtggaaatgaagatccgcccagaagccttcaagccctgagagaaggcagacactgaggagggagaacagcatgggaggaggaggtggacacagggtaggagggaacagtttatcatccaggagcacaatataactttacctgtgtgagcacacacacacaatagaaccacacgtgccaacagtgcacactagcagatggagccaggcggacccagtggggcctgccacggtgcctcacgggagaactcatggacaacggtaaccctgaggtcacttaacccattttccctaactgaggcttagatgacacgagggaaaagaacaaataaaaacctggtgtgattctcagcggagaggctgtgagaaatgaaagaaagcaggtggtggagaaggggcttccaagtcttaccccgcgacacttccttgtgtctatagtatttgttttgtttttctttttgagacagggtctctctacacagctctttctgtcctggaactcactatgtagaccaggctgaccttgaactcacagagatctacctgcttctgcctcccaagtacagggattaaaggcatgtaccaccatacccagtatatataatttttaagacacaaaaaacatggagatagagagcagctgcccaggtgtctccgggggggccttgttgtcagagtcctgggggagagaggagcactggacaacatgctgcgggtctgacgtggcgagaacaccagccggaggtgagcacagactctgggtgatcacaatactgccttcaaacatcctcagtcaaaaaccaaaagatcccctttaataaaaatgcttggaaaatgaaggtagatggcgctgtggtttaaaacttgtgatgtatatagaagcatcttccttgtaaaaataaaatattgtaattcctatttttcttttttttactttttattaggtattttcctcatttacaattcctatttttcaaaatatctttttctattacaataaatactatcaaaatttaaaaaaaaaaaaaaa

SEQ ID NO: 232 - DNA, 503 bp, Mus musculus
aaacctctctattcagcacttcctctctcttggtctggtctcaacggttaccatggcaagacccttggaggaggccctggatgtaattgtgtccaccttccacaaatactcaggcaaagagggtgacaagttcaagctgaacaagacagagctcaaggagctactgaccagggagctgcctagcttcctggggaaaaggacagatgaagctgcattccagaaggtgatgagcaacttggacagcaacagggacaatgaagttgacttccaggagtactgtgtcttcctgtcctgcattgccatgatgtgcaatgaattctttgagggctgcccagataaggaaccccggaagaagtgaagactcctcagatgaagtgttggggtgtagtttgccagtgggggatcttccctgttggctgtgagatagtgccttactctggcttcttcgcacatgtgcacagtgctgagcaaattcaataaaaggttttgaaactaaaaaaaac

SEQ ID NO: 233 - DNA, 4675 bp, Mus musculus
ctggattcccggcttcccttccgcacactggggtcctggcggacacaactgggttctgaggcaccttccaagacctctcagggtgtgagcgagatcctcagggcagcaatggcgcctggacagagaggctggggctcgcactacagaggatttgtgctgctctccattctcctggggatgcggtgggaagcctgggcaggacagattctctactccgtgtctgaagagacagacaagggatcttttgtgggaaatatcaccaaggatctgggactgcagcctcgggagctggcggagcgcggggtccgcatcatcaccaaaggtaagacccagcttttctctctgaacccgcggagcggcagcctggtcaccgcgggcaggatagatcgggaggagctgtgcgctcagagcccgcgatgtctcgtgagctttaacatcttgatagaagacaagatgaatctttaccctatagaggtggaaataatggatgttaatgacaacgctcccagattcttaacagaagaaataaacataaaaattatggagaatgcagctcctggggtgcggtttccactaaaggaagctacagattcagacgtgggcaagaactccctccagagataccagctcagccccaatcaccatttctccctggttgtgcaaagtggagatgatggcaccaagtacccagaactggtgctggagaaggctcttgatcgggaagaagaggggcttcaccatctggtcctcacagcctatgatggcggggacccgctccgatctggcactgccagcatccgcgtgacagtggtggatgtgaatgatcacacgccagtcttctctctacccctgtatcaagcgacagtccctgagaacgtgccagtaggcacaagacttctcactgtaaatgctatcgacttggatgagggaatctatggggaagtgacttattctttctggaaaataactccagaacttctacaaatattccatctgagctccctgacaggagagctgtcgactttaaaaggtctagattatgagcaatccagcttctatgagctggaagttcaagctcaagatggtgctggcagtctgaccaaggcaaaagtactgatcacagttttggatgtgaatgacaatgccccagaagtgactgtcacatctgtgagcagcccagtccctgaagacacgccacctgggacagtgatcgctctcttctacctccaagacaaagattcggggaagaatggtgaggtgacctgctctttgccagaaaacctgccttttaagttagagcgatcaattgataattattacaggttggtcacagcacgaaacctggaccgggaaaagatgtctgtgtacaacatcacactgaaggccacagatggtggaatccctcccctgtccactgaaactcgcatgtccattcatgtgtcagacaccaacgacaacccacccaccttttccgactcttcttactctatctacgtcccggagaacaatcccagaggagcctccatcttctcggtgactgcacaagacccggacagtgacaagaatgcccaagtcacttacgctttagcagaagacaccatccagggggtaccggtgtcgtcctacgtctccatcaactctgacacgggtatcctatatgcacttggatccttcgactatgagcaatttcgggatctacaacttcgagtgactgctcgtgacagtggggacccacctctcagcagtaatgtgtcactgaaactctttgtgctggacaagaatgataacgcccctgagatcctgtaccctgccctgcccactgatggctccacaggggtggagctggctccccgctctgcagaacctggatacctagtgaccaaggtggtagctgtggacaaagactcaggcccaaatgcttggctgtcctaccgcctgcttaaagccagtgagccagggcttttctcagtagggctacacactggtgaggtgcgcacagcaagagccctgctggacagagatgcgctgaaacagaaccttgtggtggttgtacaggaccatggccaacccccactctcagccactgtgacactcactgtggctgtggccaacagcattcctgatgtcctagcagacctaggcagcattaggacccccagtgaacctgatgattcagatatcaccctctacctggtggtggcagtggccactgtttcctgtgttttccttgtctttgtcactgtgttattggctctcaggctgtggcgttggcacaaatcacacatgctacaggcttcttcaggtggtggcctggaagatgtgcctgcctcacactttgtaggtttggacggtgtccaggctttcctacaaacatattcccatgaggtttcactcactgcagactctcgaaaaagccacattatcttccctcagcccaattacgtggatacacttatcagccaagatagctgtgagaaaagtgattctttgttaacatccatagattttcaagaatgtaagggtgaagccccaagttcccagcaagccccgcccaacactgactggcgtttctctcaagcccagagacccggcacgagcggatcccaaaatggtgatgaaactggcacctggcccaacaaccagtttgatacagagatgctgcaagccatgatcttggcctctgccagcgaagctgctgatgggagctctaccctgggagggggcgctggcaccatgggtctgagcgctcgatacggaccccagtttaccctgcagcacgtgcctgactaccgccagaacgtgtacatccctggcagcaatgccacgctgaccaatgccgctggcaaacgagatggcaaggctccagcaggtggtaatggcaacaagaagaaatcgggcaagaaagagaagaagtaatatggaggccaggccttgaaccacaaggcagcctccctccccagccagtccagctcgtccttacttgtacccaggcctcagaatttcagggctcaccccaggatactggtaggagccagggccatgctccccgttgggaaacagaaacacgtgcccaagccaacaccccctctctataccctagggagttgaatatgcaaagagagttctgctgggacccccctattcaatcagtgattgtacccacatgggtagcagggtttgtgtgtgtggacatacacacacacacacacacacacacacacaaaccatgccacactcccttagttacagctgaactcctccatcttccaacccaggcaggcttatccatctcctgccgccctctccccaccccacccactccttcagtccctctctttgagcaaggtagctgggctgttggggtgaccggtgagctaagccggctcctagttctgaacggtagggagagtattacaatcttttggcctctccttcagttcagctttcccccaaagcatggtttggtaccagtcttctcttttccttccagagcctgagaccaatgcttaagttttgggggaacaggcaccctccctctggtactgatgatgcttgctggattttgggaaggcattttgctactaagcctcttttcaatgcctggggacaactagtcttttgtttttcattgtttgatgttcccactgcatgctgtgacttccctacacctcaaagaagagactcctttgcatgtctggagacagtagggggtggtaaactaaagggaagttgagagtgtatactgctgggagtggggcagtggacaaaacagcctgttaatagggtcttgcaaggggctctgtatgtacccaggggactggctcaatcctcacattctagccatagacaaacaccaggccagacccctccattctggttcagcctgggcagcttgggctgagccaccaggaccaatggatttaagctgacatttcagtccaagacgacgacttctaagtgagtttaagaccagagaggaaagaggggcctctgtgggtgctgggtactccagaggtgcccttggtgggaggaccagtggtcttagcaggaaggggggcccagcaaggtcattcttggaccctgggtctagtccagtagctagaaaaagggaccaagtggccataaagtcccagccaatgatggggcttttccagtgggcccctgtagacctcaagcccctggcctccaccttaccaggtgccatttcttctcagaaggccactgcccaggcccccaggccgcccccttgtggccagagaacggttaaagccccccagtgcctccttgtgcatagaacttcctctgccctagcccttacagtagtgtagaagatccccctcccccgctggcgtagaatagccaatagtatagtgtggtgtgcttttacgtgatggcgagtgggcagcgggcggtgggctgtacacagccgtctgtcctttgaatctcaatctgcctgcgcggcccgtgctgtgttttgtgctgtgtccacacgctgcggcgacccctccctgtactgacttctctataaaaagcttctcttcgcatagtcacgtagctcctgcccatcccccttccgatatctctcgcaagttttatactctaatatttatatggcttttttcttcgaaaattaaaaataaaaaaatggtttcttctgaaaaaaaaaaaaaaaaaa

SEQ ID NO: 234 - DNA, 682 bp, Mus musculus
acaaacaagagaacggaaaaaacctacaaatgccgagagccgcccgccagacccagcctcttccagcggctgctggagaacccttcatcagcgcttggcgacatccgtagggagatgggccaagccacccgctattcccgggttaaccaaacccaggctggagacaccggccccttcggccctggacagtgacctggtccacgacctcactctttgccttgctttagactcctgtatcttcggaaagcctccctgctttggctcccaggcttctgggtccccttcccccttctccaccaagaatttggtcaagatgaaaactaagggttctggtggaaattttgggcaggaagctgaggctctgtgaccagaaacagagtgtccagctgtagatgaagccaggaccggggacgtggttgtccacctaaggcctgagtctcagcctttgtgagatcctctgccccagtttaggttctgaggtcgtatttattgagataaagccccagtgggtgggtgtgaatccgggtacaagttgggcccgtggaatgtggggaaagggtgatttggggttgtcatgcaggggaagctagggtggcagcgaggatggttccatggtgcttggaatgccctccggacttgggggcaggtgctattgggctcaattaaaaatgctataatttcc

SEQ ID NO: 235 - DNA, 2193 bp, Mus musculus
cttcgtgggaatctaccttcctcctgcacctttactccatcctctaccaacatgagccgccaattcacctgcaagtctggagccagcaacaggggcttcagtggttgctccgcagtgctctctgggggaagctcatcctcctaccgggcaggaggcaaagggctcagcgggggctttggcagtcggagtctctacagcctgggaggtggcaggagcatcactcttaacatggctagtggcagcgggaagaacggaggttttggatttggccggaaccgagccagtggctttgccggaagtatctttggcagtgtggccctggggcccgtgtgccctgctgtgtgcccgcctggcggtatccatcaggtcacagtcaatgaaagccttctggccccactcaatgtggagctggaccctgagatccagaaggtgcgcgcacaggagcgggagcagatcaaggctctgaacaacaagtttgcctccttcattgacaaggtgcgcttcttggagcagcagaaccaggtgctgcagaccaagtgggagctgctgcagcagctggacctgaacaactgcaagaacaacctggaacccatccttgagggccacatcagcaacatgcggaagcagctggagacgctgtctggggacagagtgaggctggactctgagctgaggaatgtgcgtgacgtggtggaggactacaagaagaagtatgaggaggagatcaaccggcggacagctgcagagaatgagtttgtgctgctgaagaaggacgtggatgcggcttatgccaacaaggtggaactgcaggccaaggtggacaccatggaccaggacatcaaattcttcaagtgtctgttcgaagccgagatggctcagatccagtcccacatcagcgacatgtccgtcatcctgtccatggacaacaacaggaacctggacctggacagcatcatcgatgaggttcgcgctcagtatgaggagattgccctgaagagcaaggctgaagctgaggccctgtaccagaccaagttccaggagctgcagctggcagctggtcgccatggagatgacctcaaaaacaccaaaaatgaaatcactgagctgacccggttcatccagagactccgctcagagattgagaacgcaaagaagcaggcttctaacctagagacagccatcgctgatgccgagcagcgaggtgacagtgccctcaaggatgcccgggccaagctggatgagctggagggtgccctgcaccaggccaaggaggagctggccaggatgctgcgtgaatatcaggagctcatgagcctaaagttggccctggacatggagatcgccacctaccgcaaacttctggagagcgaggagtgcaggatgtccggagaatactcttcccccgtcagcatctccattatcagcagcaccagtggcagtggaggctatggcttccggcccagcacagtcagcggtggctacgtggccaatagcactagctgcatctctggagtgtgcagtgtccgtggtggggagaacaggagcagaggtagtgccagcgactacaaggataccctaacaaagggctccagtctgagcaccccctccaagaaaggtggccgatgagagggcttcttgtgacctcgatccctcagcaccctctgtgccctagcctgttgtccccctccctactcccttatatcattcctgggcccctagatgtgtcctcagctaacctccttctctctccaagtgttctgagcctgggtagctctgggctaccatgtggtgcacttctgacagacaccaggggtttctaagcttcagctcaggtccagcctgtcccttccaccagcctttgcctccgtcctcaccacactacctggtttcttgggtctccatctgggcttcctcgtctgctgagcttttgtcccagctcctgtgtacaacacaagctagagctgtacccaagaagaagactaacagaaaaccaactcagagttgggagcccaccccaccccggcacagtctcgttttgagtggaaccactcagagtaaagggactctgtcttcactttcttgaacccagaaccagggaaaatgggacagccttggcttctcttgtattcttttaagccctccctgttgcattctcaataaacagcacaatctgaaaaaaaaaaaaaaaaaaaa

SEQ ID NO: 236 - DNA, 2047 bp, Mus musculus
agtaggaacagctccagccccgccagctgcagccaaggcgagaacttcacaagcagcacaggttgggtcgctgcggcaggagttgcaccaccagcgagaaggtcctgagcaccatggctcggagaagagccttccctgctttcgcgctccggctctggagcatcctaccttgcctgctcctgctgcgagcggatgcagggcagccacctgaggagagcttgtacctgtggatcgacgcccatcaggctagagtgctcataggatttgaagaagacattctgattgtctcggaggggaaaatggccccctttacacatgatttcaggaaagcccaacaaagaatgccagccattcctgtcaatatccactccatgaattttacctggcaagctgcggggcaggcagaatacttctacgagttcctgtctctgcgctccctggataaaggcatcatggcagatccaactgtcaatgtccctttgctgggaacagtgcctcacaaggcatcagttgttcaagttggtttcccgtgtctcggcaaacaagacggggtagcagcatttgaagtgaatgtgattgtcatgaattctgaaggcaacaccatccttaggacccctcagaatgccatcttctttaaaacatgtcaacaagctgagtgtcccggagggtgtcgaaatggaggcttttgtaacgaaaggcgggtctgcgagtgtccggatgggttctacgggcctcactgtgagaaagccctgtgcataccccgatgtatgaacggtggtctgtgtgtcactcctggcttctgcatctgcccccctggattctacggtgtcaactgtgacaaagcaaactgctcaaccacctgctttaatggagggacctgcttttacccgggaaaatgtatttgccctcctggactcgagggagagcagtgtgaactcagcaaatgcccccaaccctgccgaaatggaggtaaatgcattggtaaaagcaagtgtaagtgcccgaaaggttaccaaggagacctgtgctctaagcccgtctgcgagcctggctgtggtgcccacggaacctgccacgaacccaacaagtgccagtgtcgagagggctggcacggcagacactgcaataagaggtatggagccagcctcatgcatgccccgaggccagcaggcgccgggctggagcgacacacgccttcacttaaaaaggctgaggatagaagggatccacctgaatccaattacatctggtgaacccctaccccaccatctgaaacggttcaagttacaccgggttcacagcctttgttaacctttcgcgtgttggatgttcaaatgctgttcattacactttagaacgccggcctgaattttattagcttcattataaatcactgggctgatatctactcttccttttaggttttctaagcgtgtctagcatgatggtatagattttcttccttcagtccttttgggacagatcttatattgtgtcagttgatcaggttaaaaagaaaaaaaaatatctgtcttttcagtgtgtagttgacagatacttgcaaaatcacaacacatttgtggtcttagaatggggagtgttagagaggttaaactgggcagagatgcataaattacaaggtttcggataaagccaatagcagcgtttaagctacagtatttccaattttattgtcaaatatttggacatctgtctaattaatacttcaattgcccccccccccatcttgaatgcatacaatctatttcacccttgctgttactctagacagttcagttttgatggggcgggggacaaagtttaaaaaaattacactgagttagcggcatttaaacaatataatatattgtaaacacgacgagataaggaatataatgtatgaagcctttgcattggatggaagcaatataatatattgtaaacaaaacacagctcttacatagtaaacgttttatactgtttgtatgtatgaaataaaggtgacgctttcactttcaaaaaaaaaaaaaaaaaaaaaaaaaaaaaa

SEQ ID NO: 237 - DNA, 1124 bp, Mus musculus
gccaccgcccgcatcgtcctcccgcctgcccgcccgcccgccctccggacggccgcagccctgcgggtctctgctcgggacccacccccgccccaccccgcgcgcctctgccgcctcttgcagcgagccagcttgccgagcggccgtcgctgccgctgccgccgccgccaccgcgccaagttccggccgcggccaccctccgccgtccagggctcctccgcctcggccccgggaccccggctccctgccagccccggccccggcaccatgtcggagaagagcgtggaggcagcggccgagctgagtgccaaggacctgaaagaaaagaaggacaaggtggaggagaaggccggccggaaagaacggaagaaagaagtagtggaggaggaggagaatggagctgaggaagaggaagaagaaactgcagaggatggagaggatgatgatgaaggggatgaagaagatgaggaagaagaggaggaggatgaaggccccgtgcggaagagaactgctgaagaggaggatgaagcagaccccaagaggcagaagacagaaaacggggcgtcggcatgaacccctgcccgtgggcttggggatgggaggcccctcaggtcctggaggtggggcgggaacacacaaatccagccccctttctcctggctccctgctctggccctgccccagagctgtgacccttgtcctttgacccagcctctcatttccatctctccagacactgctccttcaccctcactgccaccggtccagctcctgacccgcctcatctgagctccccagccagccctcacttgccctagcattcttgttcttctttcctgccttccctcaccatcccatatgttccggtccctgcgaagcctctccttgccctctacaccccgagcctctcagcctgcccttctttctcctgcctgacccctgggtctccctcagattccctcctctcagacagcgccaggccggggtggggctggggttggggccaagccccgaagctgccccctcccctttttgtataatttaataaagaaacggtcgcgcttctgtttttaaaaaaaaaaaaaaaaaaaaaaaaaaaaaaaaaaaaaaaaaaaaaaaaaaaa

SEQ ID NO: 238 - DNA, 2438 bp, Mus musculus
gcagctccgccgccatgggccccactgcctgcgttctagtgctcgccctggctatcctgcgggcgacaggccagggccagatcccgctgggtggagacctggccccacagatgctgcgagaacttcaggagactaatgcggcgctgcaagacgtgagagagctgttgcgacacgaggtcaaggagatcaccttcctgaagaatacggtgatggaatgtgatgcttgcggaatgcagcccgcacgcactccaggcctgagcgtgcggccagtgccgctctgcgcacccggctcctgcttccccggcgtagtctgctccgagacagctacgggcgcgcgctgcggcccctgccctcctggctacaccggcaacggctcgcactgcaccgacgttaatgagtgcaatgctcacccctgtttcccgcgggtgcggtgcatcaataccagccctggctttcactgcgaagcctgtccccctgggttcagcggacccacccacgagggcgtgggactgaccttcgctaagtccaacaaacaagtttgcacggatattaatgagtgtgagaccgggcagcacaattgcgttcccaactccgtgtgcgtcaacacccggggctccttccagtgcggcccctgccagcccggtttcgtgggcgaccagacgtcaggctgccagcggcgtgggcagcacttctgccccgatgggtcacccagcccgtgccatgagaaagcaaactgcgtcctggagcgggatggctcgaggtcttgcgtgtgtgcagttggctgggccggcaacgggctcctgtgcggccgcgacacggacctggacggttttcctgacgagaagcttcgctgctcagagcgccagtgtcgcaaggacaactgcgtgacggtgcccaattcggggcaggaggatgtggaccgggacggcatcggagatgcttgtgacccggatgcggacggggatggagtccctaacgagcaagacaattgcccgctggttcgaaacccagaccagcgtaactcggacagtgataagtggggagatgcctgcgacaactgccggtccaagaagaatgacgatcagaaagatacagacctggatggccggggcgatgcctgcgacgacgacatagatggcgaccgaatacgaaatgtagctgacaactgtccccgggtgcccaactttgaccagagtgacagtgatggtgatggtgttggggatgcctgtgacaactgtccccagaaagataacccagaccagagggatgtggaccacgactttgtgggtgatgcctgtgatagtgaccaagaccaggatggggatggtcaccaggactcccgggacaactgccccacagtacccaacagtgcccagcaggactcagatcatgatggcaagggcgatgcctgtgatgacgatgatgacaatgacggagttcctgatagccgggacaactgccgcttggtgcctaaccctggccaagaggacaatgaccgggatggcgtgggtgacgcgtgtcagggtgacttcgatgctgacaaggttatagacaagatcgatgtgtgccccgagaacgccgaggtcaccctcaccgacttcagggccttccagacggttgtgttggaccccgagggtgatgcgcagatcgatcccaactgggtggtgctcaatcagggaatggagatcgttcagaccatgaacagtgaccctggcctggctgtgggttacacagccttcaacggcgtggacttcgagggcacattccatgtaaacaccgccactgatgatgactatgctggtttcatctttggctaccaagacagctccagtttctatgtagtcatgtggaaacagatggagcagacgtactggcaggccaatcccttccgggctgtggctgagccagggattcagctcaaggctgtcaagtcctctacaggtcccggggaacagctccgaaacgcactttggcacacgggggacacagcatcccaggtgcggctgctgtggaaggatcctcgaaacgtgggctggaaggataaaacatcctaccgctggttcctgcagcaccggcctcaagttggctacatcagggtgcggttctatgagggtcctgagctagtagctgacagcaatgtggtgttggacacggccatgcgtggtggccgcctgggtgtcttctgcttctcccaagagaacatcatttgggctaacctgcgctaccgttgcaatgatacaatccctgaggactacgagagtcaccggctgcagagagtttagggaccagtggggtcccgctgcctgatggactgtggtggcataagctacgggtgtgtgtgtgtgtggggtctggcatccctctgaaggggtgtttggcctggggaggagaggcaaataaagtacgtatgtgggggaaaaaaaaaaaaaaaaaaaaaa

SEQ ID NO: 239 - DNA, 867 bp, Mus musculus
cccacgcgtccgcggacgcgtgggttgcagcagacccgcagggcagtgtgcctcggtggcattgaactgaagcttggctctcggcctggcctgctggctagttgcccaccctgtgggtcccgcccagagcaaggatactggagctttcgcctgcctccctgagcctgggtctccactccagtcatccctccagctactttgcagcactctgtcgccatgagcacctcgtctgcgcggcctgcagtcctggcccttgccgggctggctctgctccttctgctgtgcctgggtccagatggcataagtggaaacaaactcaagaagatgctccagaaacgagaaggacctgtcccgtcaaagactaatgtagctgtagccgagaacacagcaaaggaattcctaggtggcctgaagcgtgccaaacgacagctgtgggaccgtacgcggcctgaggtacagcagtggtaccagcagttcctctacatgggctttgatgaggctaaatttgaagatgatgtcaactattggctaaacagaaatcgaaacggccatgactactatggtgactactaccagcgtcattatgatgaagatgcggccattggtccccacagccgggaaagcttcaggcatggagccagtgtcaactatgatgactattaagcttcctgaggtgcccacagagcttgtgcctgcttcagtaggccttctctacctataccacgtgaccatcaggctaaaggaaagaatataagtgctttttgcatttcatgcatgtgcttaacgatatgtctcacttaaaaaaaaaaaaaaaaaaaaaaaaaaaaaaaaaaaaaaaaaaaaaaaaaaaaaaaaaaaaaaaaaaaa

SEQ ID NO: 240 - DNA, 1434 bp, Mus musculus
atggggtggaaaatacttcccgtctgcttgtcgctgctgcttcctgttgtcttgattcaacaggtttcatctcaagagctctcctgcaaaggacgctgcttcgagtccttcgctcgagggagggagtgtgactgtgactcccagtgtaaacagtatggcaagtgctgtgcagattatgacagcttctgtgaagaagtgcataatcccacatcaccatctccaaagactgcacctccgcctccaggagcatctcacaccatcaaatcaactaccaaacgctcacccaaatcaccaaaaaagaagactaagaaagttgtagaatctgaggaaataacagaagtaaaagataacaagaaaaacactcctaaaaagaaacccaatccagaaccgccggctgtggatgaagctggaagcgggctggataatgaagtcatgctgccaaccaccaccatccctaaacaaactccaaaccctgaaacagctgaagtaaatccagatcatgaagatgcagatggaggtgaaggagaaaaacctctgattcccgggccccctgtgctattccccacagctattccaggcactgatcttttggccgggagactcaatcaaggcattaacatcaatcccatgctttcagatgagaccaatttatgcaatggtaagccagtggatggactgactacgctgcgcaatgggacattagttgcatttcgaggtcattatttctggatgctgaatccattcagaccaccatctccaccacgcagaattaccgaagtttggggtattccctctcctattgacacagtttttactagatgtaactgtgaaggaaaaactttcttctttaaggattctcagtactggcgcttcaccaatgatgtggtagatcctgggtatcctaaacaaattgtcaaaggctttggaggactaacagggaagatagtggctgctctttcaatagccaagtacaaggacaggcctgaatctgtgtacttcttcaagagaggtggcaacattcagcagtacacttataaacaggagccaatgaagaagtgcacagggaggcggcctgccatcaactactcggtctacggggaggcagcacaggtcaggaggcgccgctttgagcgtgctgttggacctttccagacacacaccttcaggatccattactcggtgcccatgagagtttcttatcaagacaaaggtttcctccacaatgaagtcaaagtgagtacaatgtggagagggtttccaaatgttgttacttcagcgataacactgcctaacattaggaaacctgatggctatgattactacgccttttccaaagatcaatactataacattgatgtgcctacaagaacagcaagagcaattaccacacgttcagggcagaccctctccaaaatctggtacaactgtccttga

SEQ ID NO: 241 - DNA, 1734 bp, Mus musculus
accttatcattaggtggcttttctgtcagacttgtgtgggaattttcactccccggtaaagcactggaagcagacacatcaagcccggagagatttccctgggcacttattacaccctgcggggagtaagagggctcggggcatctggctggtcactgtctggagggggcttggcgtgctggtgggtgctgcagaagaggcctcagtgcactggctaagagccaccagaaggaagcagagcgtcttacaacttggtgccacgatgctagctgcccgtctctccagacccctgtcacagctcccaggaaaagccctaagtgtccgtgacagagaaaatgggacaagacacacgctgttgttttatccagcatccttcagccctgacacccgtcggacctacgccagtcaggcagatgcggctagtggcaaagctatcctgatcacaggctgtgactctggatttgggttctcactggccaagcatctgcactcaaaaggcttccttgtatttgctggctgtttgatgaaggacaaaggtgatgctggggtcaaggaactggacagcttgaagagtgaccgactgagaaccatccagctcaatgtctgcaacagtgaagaggtggagaaggcggtggagacgatccgctccggcctgaaagatcctgagaagggaatgtggggcctggttaacaacgcaggcatctcaacgtttggggaggtggagttcaccagcatggagacatataaggaggtggctgaagtgaacctctggggaaccgtgcgcaccacaaaatccttccttccccttctccgaagagccaaaggtcgcgtcgttaacatcagcagcatgctgggccgcatggccaaccccgcccgctcgccatactgcatcaccaagtttggggtcgaggctttctcggactgcctgcgctatgagatgcaccctctgggtgtcaaggtcagtgtggtggaacctggcaacttcatagcggccaccagtctctacagccccgagcgcatccaggccatcgccaagaagatgtgggatgacctgcctgaggtcgtccgcaaggactatggcaggaagtacttcgatgaaaagattgccaagatggaaacctactgcaacagcggttccacagatacttcctctgtcatcaacgctgtcacacacgccttgaccgccgccaccccgtatacccgctaccatcccatggactactactggtggcttcggatgcagatcatgacccattttcctggagccatctctgacaagatctacatacactgaagagctgaagaggtcccttcggtctccgccagggaacctggtgggagggagaaagatgaggggagggagtttaccttttgattagctattgaggattacccactgtcttaggaagacctattttaaccttacgtgttcaatgtggtgaatggtttgggccttcacaaattagggggggggggcggagggcgcaggtgggtggccctaaacctcagggccaatatggtgcttctatctatctcgagttgattttatataaagatttgtggggaaatatctttatattaaaagcaggttattagaatagaatccaaaatcattttccagccaaaacatccattcgaaatctgtatcccatttgatccttatgtaagtctcatgagtaaacagaacagaattttaaaaaaaaaaaaaaaaaaaaaaaaaaaaaaaaaaaaaaa

SEQ ID NO: 242 - DNA, 4158 bp, Mus musculus
ggggactattagccatgccctgcgggagaactgtccaatgatatcttttcatgggttccttgaaatttacagaaggaacactaaaagcaaatctctcacaatcctttggatgcaaagggatggtaaagaaacaatctttcaaatctataacaatcttataatatcccttaggaatggctactggggaggggagccccggttgtaaagttcccataagtaccatggtttcattaacctttcttaaatcttgcaacagtctccattttcccgatttcttcctgataatgaaaatgggtgtattccagggagagtgagactccaccaaatgtcctgcttctaactgctcctgcactagcaaagaagcggcctctattttctctttaggtaaagaccactgatctacccacaccggaatatcattacgccattgaatttttttggcgtgggatgcaggcaagacagtggccgctactgaaaatactttaaacctctcacgttagagtggggtttaagatcctcaaaagtcttaattttctgtcccttctttattagtccacgatcaggcaggggtccctgcctgaaggtctgttcagtcaccatctccttagaactgcacaggataacgcccatctgtgacaacagatctcttccccacagggggtacaggcaaatttgggataacatacggctggatatttcctgattttccatcctcatctctccaggttagcaatttggaactacgttttgggttactgggataaccaattccttgaaggtgagtcaaggaaacagacaggggccagtttgagggccagtcctgccctctaataatcgttacatcggccccggtatctattaatccttcaaagctttttccatcaagaatcaatttaaggttaggtctctgattggtgatagatttcacccaatttacgccagaggaggtcaaagttattctgtccttcttcattttcaaagaatttagatagtgaccagcacaaagggatcaaagtaagttgagcaattttctgattagcgggtatagttatagcaccacgagggccaagcgggctatgattttaatttctccctcataatcattacttataacacctgcataaatctgcaggccttctacaatagaactgcttcgtcctaagagaaaaccacaggttcctacaggtagtggtccaaaaactccggtaggcagagctttggactcccacttctggggttaatgctgcatggacagtggaacagaggtccagtcttgcatttcctgggtttgacctgacaagctcaagaactgatcttgttggctgggcagcagatttatagccccataagctgtcttctttgagtaactcggggcctggggctgacccctttcctcgtttcccggcaccgggcggctcaaaaccctcgttttatgcttacaatcttttgcccagtggcggcccttcccacaccggggacatattcctggggcacggcctgtttgtctaacctcggcacccttgttctgaggacaatcaattctaaaatgatctaaacttccacacttaaagcatacatttttccctcgtttccttgagaacattgcctgcgcgtgggttccctgcaaggtctcgcaggaaggcccgatgtctgcgcaaaggcggacatatcccgccaaatctgtcgttcccttatgcggttgaatcgcagctcggcaaattgcattagcattctcataagccaattgcataacgaaaggacttcccgtgtccggattcccaaggattctactagctgaaatcaatagcctgtccacaaaatcctgatatggttcatcagaactctgccgaatgctagctaaacttccaccaatctctcctttgactggcaaccttccccaagcacggcgtgcggccgtcgcaatttgcacgtacactgcaacgggaaaatcaatctgatttgtctgtcccttataagggccctctcctaaaagcatgttgctatcccagtctgaattaccagcctgagcgttagaagcagcagttttcttactggcgtctcgccattcagaatcccaaagcaaaaaatctcctcctgacagggtagccttagaaagagtcttccaatctaaaggggttaagtgtgactccacaactgtgtccagtaatgcttgagtgaatggggctgaagggccatattgcacaacagccgcctttaactcttttatcaacttgaaatctaaggtctggtaatgtctgcccctagtatcttgctgatcaactacctcgaccaccggaaaggctagcgtattagacatattctgtcctttcccacgagcctgactcacaaccttttctagcagcacctggtgaactacagaagagttactcttctccgcttctgacatcttttttagttcccgaagctcattagtcagcctctgaagcttaatctcaaactctaacttgcttagtcgtgtgtccctatgagtggcacctcccgaagtggggactacaggtggagcgggagattcacaagaggaccaattctcattaaggtaatgggcagctcctctatctgagagatttttgttaaaaatcagtttttcatccgagttcccacatttatcaatttttgagttaataagatcttttctgaggaggccctctctgacaggcactcctcctgagataccacaagctccgcctgggggcaacttagccctggagaagtggcatcttttattgcatcatttacgagcgcccagaggcctagggtaaaattatctgcctgagtgatttttaaggcctcaccaactttctcccaggttccacaatctagtgtttcttcttccttgaaccatgggcaacagctatctatcttacctaaaaaattttttactaattgtacttcaagccttactcctctggcctgaaacaactcctgaaaactatgggcaaccgcctgatccatgactttaaaccctttcttcttccacctaagcagcttcctaaaaagctgcggctaacctgcctgtttccgtttctagttccgattaacacgctgctgacccaagcagaaccagcgttgggttagcactgattcaagcttaattcgtatcctactgcatcctcagcaacactttacaaaactgaaattttaagctagcgctagcatgtgtacctgtctgttgctcctatgtccaatacgaagatcctttcctgtggagctccaatgcagcgttcctcttagcatctctctgccattcttcaggtcccagttctggcgccaaaatgttgcggccgccagaagctcacgacgtgaacggttcgactgagaaggccgctcgagctgtaagagaggaatgtagtcggggcggaagaaaaaacggagctaagacaatttcattctgatcaaagctcaaatttttattgttgggacactagttatgaaggaaggggagggggacccgattcccgccggataatctcgggtccagtagaaaggtgcacgtgtgtggctccacaggttccagcagtgggcgtggcagaacgaatgagcaggaagctccaccccgagcaagcaggtttcaggctgggggaggagagactacaaatcacgagcttaattatggtttctaaaaccacaagttgaattcattgatctccagttggcagacagagaacacgaggaggaacccagcttttgacctattctcaggcacagaacgttagtaggttagaagagggtgcagcttttctactcactaaaatataatctctgtcgagtcctttcaggtagctaaggccctcttgaggaagaagagaagcagggacctggagggaacttgagtgtggaagacattgagcacgtgatggaggaggaagcccgcgcagcacacctgcagagtcaggactgagactcttcacacagaacccaggcaaacagtgggacttaggaagcagtgcttagaccctggtgctgtgctttagcagtgaggaattcctttgtatcctgagatgcaatgctgacagtttgtgatgagcaatgaggagggagctaaagtctcggttgtgttttgagtacccaggttgggagctcactgaagaagttgggacagacactggatgataagttcttcccttaacagattgaggc

SEQ ID NO: 243 - DNA, 2558 bp, Mus musculus
cttcagactcgggctaagcgcctcgctctgctccctctccggttcgctcgtggcccgcaggcccctaggcgcggcaggaggcgcctcggaggcggcggcgcggagctgcgcaggagtgggaggccaggccaccgcgcggcagcggagcgggcggggcccggcgctggtcccccgcgccctgcgcgccccggccgccgccatgagcggctcgtccggcaccccgtatctgggcagcaagatcagcctcatctccaaggcgcagatccgctatgagggcatcctctacaccatcgacaccgacaactccaccgtggcgctcgccaaagtgaggtcctttggtactgaagaccgtcccacagacaggcctgctcccccaagagaggaaatttatgagtacatcattttccggggaagtgatatcaaggatattactgtgtgcgaacctccaaaagctcaacatacactccctcaggatcctgctattgttcagtcctccctgggctctgcctccgcctcgcccttccagccgcatgtgccttacagccccttcagagggatgccaccgtatggccagctggcagccagttccctgctcagccagcagtatgccgcttccttaggtctaggagctgggttcccatctaccccagtcggcaagagccccatggtggagcaggctgtccagactagttctgttgataacttgaatgctaagaaactgttgcccagcaaggtcacctcggcgacacagctcaatggtcgccaggctcagccaagcagcaagcctgccagcgatgtagtccagccggcacctgtgcacactcaagggcaggtgaatgatgagaacagaagacctccacggaggcggtcaggcaatcggagaacaagaaatcgttccagaggacaaaaccgtccaactaacgttaaggaaaacacaatcaagtttgaaggtgactttgattttgagagtgcaaatgcccagttcaaccgagaggagcttgataaagagtttaagaagaaactgaattttaaagatgacaaagccgacaagggggaagagaaggacccagctgtgatgacgcagagtgaagagactgctgctgaggaggatcttctggggcctaactgttactatgacaagtccaagtccttctttgacaacatctcttctgaactcaaaaccagttctaggcggacaacatgggctgaagagagaaagctgaacactgagacttttggagtgtcagggaggttccttcgtggccgcagttcacgtggtggattccggggaggcagaggaaatgggacaacacggcgcaaccccacttcccaccgagctgggactggccgggtataagggtgcagtacaaggtccagcagaggcagaggtgctgccctgaagataaggacagaaggcaacactacagtcagcaggagaagtgaaccttgtgtaccagcctggaaaccctcatactgctacttagtttggacttaacctaacttggacatggtctgagatttagaaccacttggttttggggaagtatttgtaggtgacctctgaaggtttctcgacctacatttccttcttggttgcacacagcctaatagtaaggttttggtattttgcaaaaaggtttctataggcaaaggctcaatcctcactttgtaacttttttttttttaatgaccgctttgactcttaaaatggaaccaaattttatttggcacatgtggtgtccaaatgtgtctctgcaacccatctggcccctggtgctgctggcctggtaccccaactgctaaaagtgggaagtctcaggagccaggcagggccagcacagggtgagccagtcacacggggtgggagggccagggcagggacagggtgggggggtgttccatggatcatgttgtgtaatgaaccagtgatgttcagtgctgggggctaacgggatgagtgaagtagtgggaagggcgtgagtgtcacgtagagcctgcctgccttccacaggcactgaggcatagtgttgaaacccaaggcaagctcgtgtggtgtggtgtgtccaaccttcctgtctgcttcagcctctggctgcacttaagtgttctcattcacttttaaatgagccagtcttttttttttttttttttcttttttttaaggtcactggccttatttccttgattgtaaatagttatgtgtttattttaaaggtggtggagggagggcggggacataaatttgttgcatgagtaaatgtgtcagatcttctctataagcatgcatcctctgactgacagggcactgttgaaaacaagcaccttgataacccaaacccttcagaaagccacagcgcttcagtgctgtgctgatgaagtcatggcctaaaatagccacagagctttggttctgtactgatgaagccacagcgtgaaagcttggctttatctttgtgtaggacttcagagctgagagtagaactggggccactgttggggtaatgcaaactaaataaactaaataaacattggactcttcaaaaaaaaaaaaaaaaaaa

SEQ ID NO: 244 - DNA, 900 bp, Mus musculus
atgtggaacacatcagaagctgcctttttgtcttgctcctgttggtatacctgttcaccattggtggtaatatgctcatcttccctagtcatacgactggatgcagccctccacaaacccatgtaccactttgtcagtgttctctctttcttggagttatggtatacagccaccaccatgcctaagatgctagctaatcttctcagtgagaagaagacaatttcttttgcaggatgcctccttcagacctattttttccactcccttggggcctctgaatgctaccttcttacagccatggcctatgaccgatacctggccatctgccgacccctccactacccttcaattatgaccacagcactctgtgtaaagatggctgctggctgctggacttgtggttttctgtgtcctatttctgaggttatcctggtctctcagctccccttctgtaactacaatgagatccctcacattttctgtgattttccacctcttttgagcctggcctgcaaagacacatccactaatgttctggtggactttgctgtcaatgccttcattatccttatcactttcctttttatcatggcctcttatgggaggataattggtgctgtgctgaagatcaaaacagcagcaggaagaaggaaggccttctccacttgtgcctcacacctcattgtggtgctcatcttcttcgggagcatcatctttatgtatgttcggctaaagaagagctactcattgactcttgaccgcactctagccgtagtctactctgtgctaacacctttggccaatcccattatctatagtcttcgaaacaaggaactcattcaggccatcaagaggaccttcttcaagaaagtggagaaagctagtccaactcatcattaa

SEQ ID NO: 245 - DNA, 2052 bp, Mus musculus
tgagtaggctttactccagtgaggccaagtcccactcctcagagagccttggggttctaaaagactatcctcactctgcattcaccttggaaaagaaagttattaaaacagagcctgaagactcaagatagctgagatgctcctactgttctctggaaatggcaccagattcaaggataatgctccatcatagattaagccttaataaccagtgttgcctcattcagctcacagaccatagccaaagcataagaacccacacagtagtctgtggacatcaggacaaaacaacaaccacagaagagggaatcaagagagcattgcaatgtaacagacactgaccacttaccttcctgtgtaagctgcttgtgtggaaaggctcaatattgtaggcattcactatttaagaatgtacaacatgtctttgtaatttatagaaacaagtctaggtgttgataccttgtggtctaatagatgtggataccattcattttacttgaaattttgttgtctactttaagtgtatttgccataaatgttactcgtcagcaattagaacttttgcaatcatagaaagaaagtctgggcaatgtagttattggcaaggtgactggagaaagatggaagataaatacacaatttacaccaaggagaagactgtgtgtttaatacttgataacattgattttgattaataggaaatatgtagctgtcgctaaataatgtcaccttcattggtttaatcaatgcacaaattaaaaattggagtaacattcccaaaatgaggtaggctatatttatggcagctgcttaagatgtaacaaaggttggacagaggacatgaaataaatgggttattgtgtaaaagccttgacttaaaaacattgatatttcagaatatgttaaacaaattaaggcatagtaagatagccctaaatgtgataaagatgatggatgatgtgggtgaatggacatggaatgtgtgtcttgttttcagttctgctttagatcatgctgttatagatatgagttcctaatctgttatactgaaatctgttggccagatgttaggtgagatgtgtgcaccaccacaggctctaagcagtcacatagatagtcacttttcaatttgatctgtagaagagttctacagtagaaacaccagtaaacagctttactacaactacaaggcttttcccttcctagatgattctattggaccatagcaccttgcccactaaaaactatcttagggaccatgtgcctctgtttctaccgtgaggttgattattgtggtctcactgtccactgtgtgtagagctagtgtgataccatttaaatagaatgttcagtttttaatattagcctcagcactggatattatccctatactttcatgaaccgtttcctgtgttccttaatctattttgagaaattttgtggtcctttttcttttaaaaaaaaaaaaaaacaaaaacgaaaaacaaaaaaactatgtcttacagttcaagttcgtagattttaacattgcaagttataaaagaggcagtagtctcccagctgatatatatctgtctctcctggacctagaacctgcatttttaaatccagaagaaagtctccttaagtggcatacttttctcactcccaagctgagagagagagaagacgcacacacacacacacacacacacacacacacacacacacacacacacacaaattctcagtagaatacaatttttatcttgtgaacactaatgtattaaacttgctatacattaaagcaaataatatatatttttatttgaatggtatatataaattagatgttataactagtggggtgttcttcatttcatttaagatacttccactgaacaaggttaattggttacctcagtattacagccaatataacccaagggaccatttctccctaagtctgtgttattctttattgtgtgaattctgaatttttgtgattcctaaaactgttgaagagatgagtgaacttgcttcccgtggcaataaaggatttctctgcctcgc

SEQ ID NO: 246 - DNA, 1858 bp, Mus musculus
gcaccagagcaagtctaagtctgagccggctcccccagaactccagctgctgggtcttgaactcctgcgttccggagtcctagcgttgctgcacccaaggccacccccagaatcatgcgctgcgctccgacagcaggcgctgccctggtgctatgcgcggctactgcggggcttttgagcgctcaagggcgccctgcacagccagagccaccgcgctttgcatcctgggacgagatgaacttgctggctcacgggctgctacagctcggccatgggctgcgcgaacacgtggagcgcacccgtgggcagctgggcgcgctggagcgccgcatggctgcctgtggtaacgcttgtcaggggcccaagggaaaagatgcacccttcaaagactccgaggatagagtccctgaaggccagactcctgagactctgcagagtttgcagactcagctcaaggctcaaaacagcaagatccagcaattgttccagaaggtggcccagcagcagagatacctatcaaagcagaatctgagaatacagaatcttcagagccagatagacctcttggcccccacgcacctggacaatggagtagacaagacttcgaggggaaagaagctttccaagatgacccagctcattggcttgacttccaacgccacccacttacacaggccggcccgggactgccaggaactcttccaagaaggggagaggcacagtggacttttccagatccagcctctggggtctccaccatttttggtcaactgtgagatgacttcagatggaggctggacagtgattcagagacgcctgaacggctctgtggacttcaaccagtcctgggaagcctacaaggatggcttcggagatccccaaggcgagttctggctgggcctggaaaagatgcacagcatcacaggggaccgaggaagccaattggctgtgcagctccaggactgggatggcaatgccaaattgctccaatttcccatccatttggggggtgaggacacagcctacagcctgcagctcactgagcccacggccaatgagctgggtgccaccaatgtttcccccaatggcctttccctgcccttctctacttgggaccaagaccatgacctccgtggggaccttaactgtgccaagagcctctctggtggctggtggtttggtacctgtagccattccaatctcaatggacaatacttccactctatcccacggcaacggcaggagcgtaaaaagggtatcttctggaaaacatggaagggccgctactatcctctgcaggctaccaccctgttgatccagcccatggaggctacagcagcctcttagcctcctcactggagcctggttccaggcctaagaagacagtgactttggttgtggccctgagatttggccattctctgctgggggcaggagctctaagtagggctatctgcgtcttgtggacaaagaagaagcccgtaactggagagactggaggaccccttttccgtgttggggtctgcaagcattgttgtctgaaacagtcagagcaacaggaaacaaatggcccagatccagaaaacatgggctcgaggggcactgaatatcacttctcgcctaccagagaagttggggatgcagagggaccactacagtccaactagctgggcccttaatggcggactcagtcatattgactgactggagacagggtgccaggagccctggatacactcatggtgctgttgtaggtgctgtggatgcacaggtgctaactgtggttcccaggcacagctcacagcattcttacaataaaaacaacctcagaacaaaacaaaaaaaaaaaaaaaaaaaa

SEQ ID NO: 247 - DNA, 2622 bp, Mus musculus
cttctggcgggtgttggtgtcgggaggaggcgagagtcggcttagcctgtgtcgcgtctgtctcaggaaccggacggagagtgagggcaccagggctcactctctaggggggctgccattttccgcgttcacgccgtcgtgaggagcgcagcccggactctccacgacccctccgactccctactcgcgggcctcgaggccgcggcggccaccgagacagcgccgcacctcccccaccccttcccctcgtcccccgcccgccagggcccggccggtgccccacccccgcctgcctgcccgcccgaccgcccgcccgctacgccgccgccatgtcggcgcaggcccagatgcgcgctatgctggaccagttaatgggcacctctcgggacggagatactactcgtcaacgaatcaaattcagcgatgacagagtatgcaagagccaccttctcaactgttgcccccacgatgtcctttctggaacaagaatggatcttggagaatgcttgaaagtccatgacctggctttaagagcagattatgaaattgcgtccaaagaacaagactttttctttgaacttgatgccatggatcatctgcagtcattcattgcagattgtgatagaagaacagaagtatctaagaaaagactagcagaaactcaagaagagataagtgctgaagtggctgcaaaggcagagcgtgttcatgagttaaatgaggaaataggcaagttgttggccaaagtggaacaactaggagctgaaggaaatgtggaagaatctcagaaagtcatggatgaagtcgagaaagcacgggcaaagaaaagagaagcagaggaagtttatcggaactctatgccagcttccagcttccagcagcagaaacttcgtgtctgcgaggtctgctctgcgtatttaggtcttcatgacaatgacaggcgactggctgatcattttgggggtaaattgcacctgggatttattgaaataagagagaagctggaagaattaaagagagttgtagctgagaagcaggagaagagaaaccaggaacgtctgttacgaagagaagagagggagagagaagaacgggagaaactgtggaggtcccgatcacatagcaagaatcccaaaagatctagatccagagagcatcgcagacaccgatctcgctccatgtcacgagaacgcaagaggaggactcgatccaagtctcgtgagaaacgccatcgccacaggtccaggtccagtagccgaagccgcagccgtagccaccagagaagtcggcacagttcaagagataggagcagagagcgatccaagaggagatcctcaaaagaaagattcagagatcaagacttagcatcacgtgacagagacaggagttcaagagacagatcacctcgtgaccgagatcgaaaagataagaagcggtcctatgagagtgctaatggcagatcagaagacaggaggagctctgaagagcgtgaagcaggggagatctaactagctgtgtacatatcttcaatccttaagcttcccatggagttacatgctattgtttatagttgtaaagggtgacagttctagacaccgatccagtcagactagatgtatagtatccaatgatttgaactgaacctgttttccttcataaagcctaaaactacatccatagttttttgtgaacctgaacataacagtttatatgatgagatactgttctctattctttcaagttaggagtgatagtgaatgaattgtgttaatgtcttgcagtttttgaacatttgtaaaatattgtcttcttttctattccaaacagcagcagctttaggattttttttttccattataattcttcttcctttgacttttatatctcctgatacctgttcctccaactataagaggagagggtgaagggaagtattgtaacttcttttctaaggttctgttcacgttggttattagttgattacagttgagcatttctactggattgtgtgctggagacatttaaacacggggctgttttgttaggggcctatagagttggaagttgaacagctgttgcattacatacttttgcttttatattgaaaatttgaaatcagacttgccttgattttttttttttttttttgttctaagaaactgctatgttcagtatattgaggggggtgggggggcagggactatttcataatagcacttgtgtgtgtgtgtgtgtgtgtgtgtgtgtgtgtgtgtgtgtgtagagtttaaagactataattgtaaaaaaaatgaaaagaatcatcaccaccactgtaacttgttgatagtaagttgccactagaactatttgctgtggttattttctattttgtaacatcttaacagtgcctttctgtataaggcaccaaaggaagtaaatatttaactctggatttcagatgaattgttgctccacccaaatctcttgctgcctatactatacttcagagctgtagtgagcagcttctgtaaggaaagagtgaacctgtagaagcaactaagagttgcttggtttgtatttcttaattgacaagcctgaataaaaaccatatgtaaccaacatactgaaacagcagtttct

SEQ ID NO: 248 - DNA, 1344 bp, Mus musculus
gagacgctccgagatgccgaagggccagcagcggccccgaagctccgggctggccgcgctgtcgctctgccgcgccccggtctcgaagtgaaggtgcctcttcctggctagcccacctacatgctgtcatcactgggcttctgcaactctcagtctttgtggctgcacccttcccttctgaatcctgaggacccatgagtgtcaggcccatcatgaaattggtcgtcttactgggtctttcccctgcagctttcccgaggctgtacagcatttattggtgctcatctgtttgagtagagctggcatagaggactgccaccggctgggaggggccatggtaccagaggtcttgggtgcctgaagatactccccctagccctgatgccttggaagagaagcccttcaagacaagctgatgccaggccctggccagaggtggggacagatggcatttcctgctcagtgtgtgggcctgggccccattgcttgggggagttccatgagtgttaacaggattcaaaggaagaggtaggaacttaggggcgatcctgttggaaagatatcatttggagaagtgagggggagcttgaagcaaaggggtctgtgtcctgaggaaagtctggtaccctctgatacctctttccccattgatgctgactgatcttgcttttgggctgatctgtcaagaagactggcatgtttccactggagatctgtcctttttttctccccagtgcccccactgttggtcagtgggcattgtgaggatcaaggctactggacactgagtagcaactcagaatccatctcggggaggttctgagggtcagcctgggcatggagagaggcaggtggcacttcttggtgggtgtggtagcagagaaatcctagaagttgcaaccgcacccctcctcgtctggagtgacaggggagtggcctgagccctgctccccagctgtccaaggcaaactgactggagtccatctggctgtccccaccagatcaggctcccttcccatcctggaacaccaaagctgctaagtctgcagaaagcacagcagagggatgcctagatcaggggtctacctaggcacacctggagctaagctgcatggggggtggggggtgagggtggggagatgcccaagggcagccaagggtaccttcaatggcctttcttcctaggttctatgtaatggtggctacacacttccctgatgactgtcatttaaggcatacataattctccttccagaacctgtctcttcattgttatcatggtcatctattcacaatatcctctgtcactttagaatatattgcttataaaaagacttgagaggg

SEQ ID NO: 249 - DNA, 2887 bp, Mus musculus
gagatgtgggcaccgagcggccaggggcccgcgggttgggaccgccgcagggtgggcgcgcgactacgagccgcactggccgggctgcaggagcttcaggggctgcgagccacgcagcaagcacgcgtgcggggagctctgggcctgcaccctgcgccagggccccgcggccaggagctgcgtctggaggcggcgctgaccgcgctacgggagcagctgtcacggctaaggagacaggatgctggcctgaagacacacttggaccagctggatcagcagataagtgaactacagctggatgtgagcaggtcttcttgcgaggccttggatagtgacagcagacccagctcaggtttctatgagctgagcgatgctggttcctgttctctgtccacctcctgcgcatctgtttgcagcgaccgtctatccccctccctgggtagctggctgcctgtgttccagccctccaagtccaggtctggcatcggggactggcgaccacgctctgctgatgagaccactgtccctgcatggagcccacagctcacagaagatagcaggctcctgcatggtgcagagggcacaggccggctgacgggcatgttccggcccagaccagtatctacaggtgatctcgaaagagtccttccagctgacgtggggctccagagagctggtactgatgctgcacatctcctgggccaggggatagagatcccagcccacgccctggaccccacgtaccagcgtgacctggtggccaggggaggccaggaggtgtacccatatcccagccccctccatgcggtggccctgcagagtcccctcttcgcctctgcccaaagaagccccgtgttttgacatctgctcacctccccaggagcctcctctggtccctgttgatgagaacaggactcaacctgagccgatccgtgagctgggctcagccgaagcctacatccacaggctgttgcatctgcggggccaagagctccccctgagagatgtggggcaggagcagggaggtgacacagctgcttttccaccgaagccctgtggccagaggtcggagagcacatgtcagctggagaagcaggcctgtggagctgacaggggaggactgaaactaggtaggggtgctgccaaggacagcctcaagcaacatgggcctgtgtcccttgtgggtgctgagcccctcagcagccccctaaaggaagaaaccattccttggaatccctgtgtccatggagacaatactgttggttcctcaccctgctcccaggcccaacagcctcttaatgactgtggccaaggaccagtcctgtcaccatccagggtgttgggcactgagagcccacctctggccccggagccctttgcctatacatcctgcaccactggtgaaacctctcccgtgaagctgaggatgggcttttcccaaaacaaggccgtgaaggtcagaagaagagttagtgagaaagtcccgaggctagggaagcagctccctccacaaccagagaggcagcgggtcacagagcgggacccctccaggccccatcagggaggtctcagcaggaggcccacactggcccgggagcctcctggacgctcctgctctgagtccaccctctaccccgtgcccttccttgtccccgtagtggtggcccagagggaaagttacccaacgtcaccccaagcgttcttcccaatggaggcagctctcctcagctcagcagccaggcggaagcagcgcaggtggcagtccaccatggagatctcagccaaagccggttcagtcagccaacctgggcccagcatggggctccctaggtccccagccaagagaggaagtggtcccagggcccagagtaggcccacacttgcccgtcaggatgcctgtgcgaggtgtgagtcggacccctcggagcactctgcagactgcacctcactctaccactccaccattgccgagaccagcgaggacgaggaggcgagtgaccacactgccaaccgctttggggacgagtccagcagcaacgattcagaagggtgtttccggggcagccgccgtcgcctggcaataggcagtgcagaggctgggcaaggggggtgggcctggcctcgggtgcccccccagcagccctcacgggccccaggaaacaccaggccacccttgccccctgtgcccaaactgtgccgcatcaaggcctccaaggccctgaagaagaagatccgaaggtttcagccagcagccctgaaggtcatgaccatggtgtgatggcagtgtttcaggacaagcctaggaccccagaaggtgccatatgatgtggtaccccgtgccatgtgatgagccgggggagggtggtatcaacctgctattgcgcttagttttctcagccaccctcactgtggttgggagtcgtctggggtcacattccctccagccattttcattgcatgaccgcagtcacaactttgctcctcaccatcctctgcctgatttgtggggagaggtctctaataagacacttctccccagagacatgaaagaaacatggcatcctttgcgggcggggggggggggggggagaacgggacgacggggacggaccagatttgcatttaactccatattgcagttgtatgaacaaacacctacaccatgctggtatagttccaaataaaagagccacatttcctttctcctcagccactgtcttgtctcttccttcccaacatgggacacgtgcggacctgaggcaggaaaggtgtttggagagtaaagccaaaaccctgggttcgacccaggtgaacggagtaggagagtaattataattataaattacttgataaacaattataaattataacttattttcatgtttgt

SEQ ID NO: 250 - DNA, 1206 bp, Mus musculus
gtgcctctcagctttcaagtttcaatcctgtagtggaaactcagctcctcagctctgagatgtgtgtcacaaaggcttccctacctatgcttagtcccacaggcagcccgcaggaggtagaagtgggtaaaattctccaaggaaaaaggcacggaaccatctcccctgagtcttgtgctaagctttactgctactatggagtgatcatggtcctcactgtagctgtaattgctctttctgttgctttgtcagcaacaaagacagaacagatcccagtcaacaagacctatgctgcttgcccgcaaaactggattggagttgaaaataaatgtttttatttttctgaatacccaagtaactggacattcgcccaggccttctgcatggcacaagaggcccaactagctcggtttgacaaccaggatgagctgaatttcctaatgagatacaaggcgaattttgattcctggattggcctgcacagagagtcgtcagagcacccttggaagtggacagacaacactgagtataacaacacgattcccatccggggagaggaaagatttgcctacctgaacaacaacgggatcagcagtaccaggatctattcacttcggatgtggatctgtagcaagctcaacagctatagcctccactgccaaactcctttttttccttcctagcatttaccaagagacgctttttagcctgttatctgtgggtgctactctttcccctatggtcccaaagtgctatcaaaccagatagagaatatttcttaacatcagaaatgaaaaccatcatttcatttcatgcagagattgttcagtggttaaaatcactgactactcttccgaaggtcctgagttcacatctgagcaaccacatggtggctcacaaacatccgtaatgagatcttctgaggtgtatgaaaacagctacactgtactttatactctgcaatttaaagcatgagggacataggagagttagctaccccacactgatgagtcccaaaaaggacgaaataacaggctaaaaagcctctcttgaactcttcatcctttcttctccctcttggtctttttaaagaccaggtcgctgaggagaaagagatggagaaatgggggaagggaaggggagagggacatgattgggggaggggagggaagggaaattaataaaaaaataaaaccaaaatactac

SEQ ID NO: 251 - DNA, 2690 bp, Mus musculus
tgtaagttccagcaccgccggggtgcgggaggaggacggcaggcgggaacaggacctggctggcgggtggcactgaagtttcctaccgccgcgctctcaccccggccggcgttcgtgccatgccggagcactgggagcgcgctgcagcatgaagggtggcgatcaggcttacacccgaggtccctctttgggctggctctttgctaagtgctgctgttgcttcccttgtagagattcatactctcattcctccagtgagaatggaggcaaatccgagtccgtggcccacctgcagtctcagccctccctgaactccatccacagttcccctggtcccaagcgctccaccaacaccctcaaaaagtggctgaccagccccgtgcgccgcctcaacagcggaaaagccgacgggaacatcaaaaagcagaagaaagtccgggatgggcggaagagcttcgatctgggatcgcccaagcctggggatgagacgacacctcagggagacagcgctgacgagaagagcaagaagggttggggcgaagacgagccagatgaagagtcacacacacccctccctccgcccatgaagatctttgacaacgaccccacacatgatgagatgactctggaaggaggctcttaccgggggagcttgaaggaccctacaggctgcctgaatgaggggatgacccctcccacacctcctagaaacctggaagaagaacagaaagccaaggcgctgagaggcaggatgtttgtcctgaatgagctggtacagacagagaaggactacgtcaaggacctggggattgtggtggagggcttcatgaagagaatagaagagaagggggtccctgaggacatgcgagggaaggaaaagatcgtgtttggaaatatccaccagatttacgactggcataaagattttttcctggctgaactggaaaaatgtatccaagagcaagacagattggcccagctcttcattaaacacgagcggaagctgcacatctacgtgtggtactgccagaacaagccgcgttccgagtacatcgtggctgagtacgatgcctattttgaggaggttaaacaagagatcaatcaaaggctgacccttagtgacttcctgatcaagcccattcagagaataacaaagtaccagctgctactcaaggacttcctgcgatacagcgagaaggctggtttggagtgttccgatattgagaaagcagtggagttaatgtgccttgtccccaagcgctgtaatgacatgatgaatctgggacgcctgcagggcttcgagggcaccctgaccgcccagggcaagctactgcagcaggacacattctatgtgatcgagctggatgccggcatgcagtcccggaccaaggagaggcgtgtgtttctctttgagcagattgtcatcttcagtgaactgctccgaaaggggtccctcaccccaggctacatgttcaaaagaagcatcaagatgaattacttggtcctggaagacaatgtggatggtgacccctgcaaatttgcactcatgaacagggagacttcagaaagggtcattctacaggctgccaactcagacatccagcaggcctgggtgcaggacatcaaccaagtcctagaaacacagagggacttcttaaatgcactacagtcacccattgagtatcagcggaaggagagaagcacagctgtgatccggtcccagcccccgagggttccacaagccagccccaggccctactcttctggcccggtgggctcagagaagccccccaagggctccagctataacccgcctctgccacccctgaagatatctacctctaatggcagtccagggttcgactaccatcagcctggggacaagtttgacgctagcaagaacgacctgggaggctgcaatgggacatcaaccatgactgtaatcaaagattactatgcactgaaggagaatgaaatctgcgtgagccaaggtgaggtggtacaggtcctcgccgtcaaccagcagaacatgtgtctggtgtaccagcctgccagcgaccattccccggcagcagagggctgggtcccaggcagcatcctggcgcccctcgccaaagccacagcagcggccgaaagtagtgacgggagcatcaaaaaagaaccctactgaaaccctaggggagaaaaggcatgccttccgttgctacatttggcccaccacgggactcactggactggacttctatttatattgtatgaagttactgatatatatatattttttttttgattggcacctagaaatgaccttagcacaaatgccaggcctggacaggtcagagcctgctgcttctcccaaaagagaggggactttttttttttttttttttttggctgtccacggcaattccactgtacagattgtaactttttatttttatttctctcctcccctgtcactttaatatatgttcatggtaatttgtaagatattccttttccttattttgattgcaaaaactcttctgaacacattcctgtataaagcattttgcactatttaaagaaacccttgtggatgaagtcaggttgtgcaatatggggagccgcaatgtttagcattgtacctgtaatgtaactaataattttaaatgtactattttaaatatgtaaaataaattttcaccatg

SEQ ID NO: 252 - DNA, 3682 bp, Mus musculus
gtgcgattccgaagcccagccacgccaggccgcccggccctggcccccagcgggcgtcgccgctccttgtcgctttgacgcctagcccagcgccgcggcgcaggactaccggtgccccgcaagttgcgagcgcactctgcgcctggggaaactttaccccgcggccgagcctctgccagagttgccccaaagctgtcatcaggagacttcaaaaggatctctccgttccttcccagaaaggaaaaggacagctggaagaggacaagctgggctgctgagagacatacctgagaccctctaactaagagattgcatcctgttgactcctgaagagctgcccaggtgaagaaccatggagggcgactgtctgagctgcatgaagtatctgatgtttgttttcaatttcttcgtttttctgggaggcgcttgcctgctaggtgttggcatctgggtcctggtggaccccaccggcttccgagaaatcgtggctaccaaccccctgctgaccaccggtgcctacatcgtactggccatgggtggtctgctgtttcttctgggcttcctgggctgctgcggggctgtccgagagaacaggtgtctgctgctatttttcttcctgtttatcctgatcatcttcctggtagagctctcagcagccatcctggccttcatcttcagagaacacctcacccgagagttcttcaccaaggagcttaccaagcactaccaaggcgataacgatacggatgttttctctgccacctggaattcagtcatgatcacatttggctgctgtggggtcaacggacctgaagacttcaagctggcctccgtgtttcggctgctgacgctggacactgaggaggtgcccaaggcttgctgtcggagggaaccccagactcgagatggagtggtgctgagcagggaggagtgccagctgggacggaatccgttcataaacaagcagggctgttatacagtgatcctcaacaccttcgaaacctatgtctacctggccggagcctttgccattggagtactggctattgagctcttcctcatggtctttgccatgtgcctcttccggggcatccagtaggccttggcctgaagacactcagcccaccactgcccagaagccagccccttctcttccctgtcctctggccccaggggcggaagcaaggccagcccaaacggccagaagcatagagctaatttttaaataaacaaacaaacaaacaaaaaagacagacatgaaggggcctcacctaggctctaaagcaaggggcatgggctctacaaggacctagggctggcctgggaccagctgttcctgagaccaaaggttcatcagcctcagagccccttggccctgtcagactggagtgtcccttggcccggatcacctctcttagcatttccaggatcagagcaaccaggaggtagaaacacatcctggaggaggagcccggtcctcaggccccaaggagccggcttttcacaacacaaggacagactctgcagcaccatctgctggagagcgaagcggtccctgctcccgctggctgagggtggctgtgtgtggacactggatcagaaggtggccctttcatttccgtccagtcacacagcatgtgcatgacaaggtcatctccaggctgctgtcgctccagccaggactccaccccgatgtaaactggccaggaactgcctgcatccagctctacagtccgtactgtgtccactctgccctgcttgtacctctgtcagagatccaactgtgatacatcacctgtccccgtgggccatgccccacccctgttctcccaggtggaagacaccccagtattgttcatttctctctttctacccagagctgaggcttgaatgtgttcttcaaggtccctgccaagaattcacccctgcatccctccacatacggatggatctcactacctcccaactcagcctcctgccttcagatgctctgatgtcaccatcacctccgcagacagaaggggtttccatttttccgtctgtgtaccccttcactctctctcctttctagaggttaaggtcatgcctcttgtctgcagacttaaccccacagcatctcctaccgtgacaccttctgaccttttgctgaacatttattttgttagtctctctaggctcagattacccagactaataggttcacaaccaaccaaccaaccaacagacacacacacacacacacacacacacacacacaaacaaacaccccagactaataggttcacaaccaaccaaccaaccaacacccccccacacacacacacacacacacacaaacttgaactgcaggctaggttagcaactagttgcaagatgcctgaccctgccaggaccgtgttgaatccattagtgttgtctgtcaggatctcaaatttgattaattatgtctgccaagggcacaaaaggggaacagtggtggaaggaacagctaggtgtctgctctcctctctcagatggaagagcctgacctgaactccagccttcctttgcccttctgccacctgggagtcatagccatagcctgttctattctgctgtctgggtgcaaggggggctacttctcccattttctctcctctttatgtggtcctcacccagcctggccttccggggagtgggtgtctctgaatgctatacggaagttgtctttatgacagcttaattggcatccccatagtaagctccctagaggctgagtcaccagatcagggggcccctctgctggcttgcacccccagactaagaggacccaggctgactcagaacccagcacgtactggactccaactgtctaggaaggcaaatggcttggctattgattggaagttcatggctaggttgaggacttagcccaaccacagcggctgccacccagaactagcccaggcttccagagatgggcagggctgggacagggagggactgagaagccagatatggagcctaggcaattccagggcagatcagagtccctcaccagaactttccacacttacgctgaagcgctcccaagtagccctgattcaacccagcttctcagcatcctcatggggccagacagacacagtcttcaccctctgagcttgctggtagccattgcaaggctgtctgaggtcatcctggtggggcttggtgagctgctctgtgtactcccagaggaatggaggggagctcttccttcaccccaagatgcctcagccagtagtgagcagaacagccacttcctgtcccagagcagtggcctaagggacagctgtatctgacaggcgaggagctaagactggacctgtggctcatgctccccattatcctgtcccaagcccctggcctacctgggttctgaacccagcaccttcatccccaggaactctgatacacacacacacacacacacacacacacacacacacacacacacacacacgtcatatgctaaagtctattttggaatttgtaaatgtcccttgcagtaggaaacagagctaatttatcattgtatctcccaagtctcccctttttatattctatattaagagaaattttgtaatataaaacaggacaccacgcaaaaaaaaaaaaaaaaaaaaaaaaaaaaaaaaaaaaaaaaaaaaaaaaaaaaaaa

SEQ ID NO: 253 - DNA, 1987 bp, Mus musculus
gctttccgaggtcctctgccgcgtgtttggaagttatggccgcgcgggtctgtggtgttctccctgaaaggcctaagctttgggtgatggcattgccttttggcactcgggagacaagatgcaggttccgtctcagaagtaatggctggatccctgaaagccaacgggctcggtgtggtccacccgtcagaaggcataggtagatggtgggcatctgcctcagacatagttctcaagttcagccagaagaatgcgcgttgagccctctgcagcccgtgtcgacggaggtgttgtctccaggaagcatcatggaaaggcgtggtggtgcacaagggccttcaggatgcctgcgcctggtgacggctgcgcctcaggttctgggcctgactcggaagggtgcctgtgagcagaagagctggcacgcgcagctcagtggaccatcagtgccaacccgtcctgtaccctggctgaggggtgtgctaagtggcagattcccggttggctcatcgtaaggcgtggcacaaaatcaccatcgaaagaaagggccttcgggatgcctctatctggtaagagcttcacagaattgcaggggttgtggttgctgggaagggttagtctgttagatcaggtgctgcagaatcgagtgtaacccttcctccctttagtcttactgtgtagcccgtgctggcctgcaacttgctatgtagacctggttgacctcaaactcagtttgtggcctttcaggtgctgggattttcatgttctcattttgtgttcccgaaaagcccataagcctatgatggattggttatccctgtctgaagatttcagctgagggaaaatactctattctgaggcttaggggtgtggctccatgcttgaagaaatttgagctttataagggatcaagttaaatagactccatagagagctgtgtgccaacctcccaaaacctaaggtctagttgcctgttaatcctcctccttgggtgctctgagggcaaagtccctgagttagcagaaatgggcgggctgccagcacctgtcctgtgctcactggagtgagacatgctggtcacatagttctagaaaatgaatgtcttcctttagaggaggcagggatgtaaggcgtgccatgagaatgcttgacgactctgtcgttgcctctagcggtgctgacatttagaaaagaagttgtggccctggcagcctcctaagtatcgtctccttgatggcacagaaacaagtggcgggcttgggggggggggggctttgctcagcccagccttagtaatgcagtgtacactgtgtcctttttctctatggaatctggggggtggatatgggcttacactaaagtagctgtacttgtggaattctctgcagggtggctctgcttgccttcacttctgagtggactcaggttcaggtcctcagggatttggttgaatataaatactctgatgtttcatgagaaacctttttttggccacttaccaggaacttcttaaaactttcttttaaaaaaaaagttagcagcctgcttctgaacttggctggtgcctgcctgtgtgtagcgcacacagtgccttgtgatggcggctggaatcccaggactatctgataatgcttgttcctaaagtttgtagttttgatcacttagctgcctgtctccttcaggttctttccttgtttctaggttattgccctgtagtgccagagagaaccacatagcctgctgctgctcctgcctttaatttcccaaagagtcatcagacgaccttggagtttgttctgcaagaggagccagtaaggcctcgtgactgtggtcaccctcggaagcctttgacagctagctggtgagggcgctcagtcggaggccctggggaggcccctgataagccgagaaaagcatttctcacagtggatttcctggaagtcagggttggcctttgtattttgaagcacaaataaactttataaaattt

SEQ ID NO: 254 - DNA, 515 bp, Mus musculus
tttgttgttgttgttgtttaatggtaaagctcagtagactccagcaccaggactggcatggagtcaaagcagcagggacggctgggtgaccccagggagcctcacatggcgaagaggatgaggaaggcgaccatcaaacagaagagtcccatggcctcagacagggcaaaccccagaatggcataggagaagagctgctgcttgagagatgggttcctggcatagccaataatcaagctaccaaacactgtgccaatgccagctcctgatccagccacaccaactgtggcggccccagcaccaatgaacttggctgctgtgtcgatgtcccgggaaatgacactggtctggaattcccgtcgggccacctggagaggggagctgctgcaggaaggctgcttagatggggcctctggtctgctcaggagggaggcagacacaggcctgattagacccctggtacaggagcgaatcagagctggagaaatgagcagtgccttggtggtctgcatttt

SEQ ID NO: 255 - DNA, 5119 bp, Mus musculus
gccgcggcgcccgaggcgggagcaagaggcgccgggagccgcgaggatccaccgccgccgcgcgcgccatggagcccgagtgagcgcgcggcgctcccggccgccggacgacatggaaacggcgccgacccgggcccctccgccgccgccgccgccgctgctgctgctggtgctgtactgcagcttggtccccgccgcggcctcaccgctcctgttgtttgccaaccgccgggatgtgcggctagtggatgccggcggagtgaagctggagtccaccattgtggccagtggcctggaggatgcagctgctgtagacttccagttctccaagggtgctgtgtactggacagatgtgagcgaggaggccatcaaacagacctacctgaaccagactggagctgctgcacagaacattgtcatctcgggcctcgtgtcacctgatggcctggcctgtgactgggttggcaagaagctgtactggacggactccgagaccaaccgcattgaggttgccaacctcaatgggacgtcccgtaaggttctcttctggcaggacctggaccagccaagggccattgccctggatcctgcacatgggtacatgtactggactgactggggggaagcaccccggatcgagcgggcagggatggatggcagtacccggaagatcattgtagactccgacatttactggcccaatgggctgaccatcgacctggaggaacagaagctgtactgggccgatgccaagctcagcttcatccaccgtgccaacctggacggctccttccggcagaaggtggtggagggcagcctcactcacccttttgccctgacactctctggggacacactctactggacagactggcagacccgctccatccacgcctgcaacaagtggacaggggagcagaggaaggagatccttagtgctctgtactcacccatggacatccaagtgctgagccaggagcggcagcctcccttccacacaccatgcgaggaggacaacggtggctgttcccacctgtgcctgctgtccccgagggagcctttctactcctgtgcctgccccactggtgtgcagttgcaggacaatggcaagacgtgcaagacaggggctgaggaagtgctgctgctggctcggaggacagacctgaggaggatctctctggacacccctgacttcacagacatagtgctgcaggtgggcgacatccggcatgccattgccattgactacgatcccctggagggctacgtgtactggaccgatgatgaggtgcgggctatccgcagggcgtacctagatggctcaggtgcgcagacacttgtgaacactgagatcaatgaccccgatggcattgctgtggactgggtcgcccggaacctctactggacagatacaggcactgacagaattgaggtgactcgcctcaacggcacctcccgaaagatcctggtatctgaggacctggacgaaccgcgagccattgtgttgcaccctgtgatgggcctcatgtactggacagactggggggagaaccccaaaatcgaatgcgccaacctagatgggagagatcggcatgtcctggtgaacacctcccttgggtggcccaatggactggccctggacctgcaggagggcaagctgtactggggggatgccaaaactgataaaatcgaggtgatcaacatagacgggacaaagcggaagaccctgcttgaggacaagctcccacacatttttgggttcacactgctgggggacttcatctactggaccgactggcagagacgcagtattgaaagggtccacaaggtcaaggccagccgggatgtcatcattgatcaactccccgacctgatgggactcaaagccgtgaatgtggccaaggttgtcggaaccaacccatgtgcggatggaaatggagggtgcagccatctgtgcttcttcaccccacgtgccaccaagtgtggctgccccattggcctggagctgttgagtgacatgaagacctgcataatccccgaggccttcctggtattcaccagcagagccaccatccacaggatctccctggagactaacaacaacgatgtggctatcccactcacgggtgtcaaagaggcctctgcactggactttgatgtgtccaacaatcacatctactggactgatgttagcctcaagacgatcagccgagccttcatgaatgggagctcagtggagcacgtgattgagtttggcctcgactaccctgaaggaatggctgtggactggatgggcaagaacctctattgggcggacacagggaccaacaggattgaggtggcccggctggatgggcagttccggcaggtgcttgtgtggagagaccttgacaaccccaggtctctggctctggatcctactaaaggctacatctactggactgagtggggtggcaagccaaggattgtgcgggccttcatggatgggaccaattgtatgacactggtagacaaggtgggccgggccaacgacctcaccattgattatgccgaccagcgactgtactggactgacctggacaccaacatgattgagtcttccaacatgctgggtcaggagcgcatggtgatagctgacgatctgccctacccgtttggcctgactcaatatagcgattacatctactggactgactggaacctgcatagcattgaacgggcggacaagaccagtgggcggaaccgcaccctcatccagggtcacctggacttcgtcatggacatcctggtgttccactcctcccgtcaggatggcctcaacgactgcgtgcacagcaatggccagtgtgggcagctgtgcctcgccatccccggaggccaccgctgtggctgtgcttcacactacacgctggaccccagcagccgcaactgcagcccgccctccaccttcttgctgttcagccagaaatttgccatcagccggatgatccccgatgaccagctcagcccggaccttgtcctaccccttcatgggctgaggaacgtcaaagccatcaactatgacccgctggacaagttcatctactgggtggacgggcgccagaacatcaagagggccaaggacgacggtacccagccctccatgctgacctctcccagccaaagcctgagcccagacagacagccacacgacctcagcattgacatctacagccggacactgttctggacctgtgaggccaccaacactatcaatgtccaccggctggatggggatgccatgggagtggtgcttcgaggggaccgtgacaagccaagggccattgctgtcaatgctgagcgagggtacatgtactttaccaacatgcaggaccatgctgccaagatcgagcgagcctccctggatggcacagagcgggaggtcctcttcaccacaggcctcatccgtcccgtggcccttgtggtggacaatgctctgggcaagctcttctgggtggatgccgacctaaagcgaatcgaaagctgtgacctctctggggccaaccgcctgaccctggaagatgccaacatcgtacagccagtaggtctgacagtgctgggcaggcacctctactggatcgaccgccagcagcagatgatcgagcgcgtggagaagaccactggggacaagcggactagggttcagggccgtgtcacccacctgacaggcatccatgccgtggaggaagtcagcctggaggagttctcagcccatccttgtgcccgagacaatggcggctgctcccacatctgtatcgccaagggtgatggaacaccgcgctgctcgtgccctgtccacctggtgctcctgcagaacctgctgacttgtggtgagcctcctacctgctcccctgatcagtttgcatgtaccactggtgagatcgactgcatccccggagcctggcgctgtgacggcttccctgagtgtgctgaccagagtgatgaagaaggctgcccagtgtgctccgcctctcagttcccctgcgctcgaggccagtgtgtggacctgcggttacgctgcgacggtgaggccgactgccaggatcgctctgatgaagctaactgcgatgctgtctgtctgcccaatcagttccggtgcaccagcggccagtgtgtcctcatcaagcaacagtgtgactccttccccgactgtgctgatgggtctgatgagctcatgtgtgaaatcaacaagccaccctctgatgacatcccagcccacagcagtgccattgggcccgtcattggtatcatcctctccctcttcgtcatgggcggggtctactttgtctgccagcgtgtgatgtgccagcgctacacaggggccagtgggccctttccccacgagtatgttggtggagcccctcatgtgcctctcaacttcatagccccaggtggctcacagcacggtcccttcccaggcatcccgtgcagcaagtccgtgatgagctccatgagcctggtgggggggcgcggcagcgtgcccctctatgaccggaatcacgtcactggggcctcatccagcagctcgtccagcacaaaggccacactatatccgccgatcctgaacccacccccgtccccggccacagacccctctctctacaacgtggacgtgttttattcttcaggcatcccggccaccgctagaccatacaggccctacgtcattcgaggtatggcacccccaacaacaccgtgcagcacagatgtgtgtgacagtgactacagcatcagtcgctggaagagcagcaaatactacctggacttgaattcggactcagacccctacccccccccgcccaccccccacagccagtacctatctgcagaggacagctgcccaccctcaccaggcactgagaggagttactgccacctcttcccgcccccaccgtccccctgcacggactcgtcctgacctcggccgtccacccggccctgctgcctccctgtaaatatttttaaatatgaacaaaggaaaaatatattttatgatttaaaaaataaatataattggggtttttaacaagtgagaaatgtgagcggtgaaggggtgggcagggctgggaaacttttctag

SEQ ID NO: 256 - DNA, 8548 bp, Mus musculus
cggtcgtagcccgctgcggcccctgaggaagcgaggaggcggcggcggcggcggctgaggcgggcggaccgacgaggcggcggcttcaggctccgagggatacgaaaacttaagcagcagctgcggcgggacctccctgtttgacagtcggcggccggaggcggcggcggcgggtacgaagaacagcaaattcaggaaaaagtggcgacctttcgactcatgttgctggaaaaggatgtgaaccctggggccaaggaagaaaccccagggcagagaccagtggtaactgagacccatcagttggcagaactgaatgagaagaagaatgaacgactccgtgctgcctttggcatcagtgactcctatgtggatggcagttcttttgatcctcagagacgtgctcgagaagctaaacaaatagctcctgagcctcccaaaccatacagccttgttcgagagaccagcagttctcgctcaccaactccaaagcaaaagaagaagaaaaagaagaaagatagaggacgcaggtcagagagcagttctcctcgacgagagaggaagaagagttcaaagaagaagaagcacaggtcagaatctgagtccaagaaacggaaacacaggtctcctactccaaagagcaaacgcaaatcaaaggacaagaagaggaaacggtctcgaagtacaacaccagctcctaagagccgtcgagctcatcggtcaacttctgcggactctgcttcttcctctgatacttctcgtagtcggtctcgaagtgctgctgctaaaattcatacaacagccttgactgggcaaagtcctccccttgcttcagggcatcaaggggagggagatgcaccttctgttgaaccaggtgccaccaacatacaacaacctagtagcccagctccctctacaaagcaatctagcagtccttatgaagacaaagataagaaagagaaatctgcagttcgacctagcccctctccggaaaggagcagcacagggccagaactacctgcccctactccgctccttgttgagcaacatgacgactccccacgaccccttgcagcaatcccgtccagtcaggagccagttaacccctcatctgaggcttccccaacccggggctgttcaccacctaagtctcctgagaaacctccccagtctacttcctcagaaagttgcccaccatcccctcaacctaccaaagtttctcggcatgccagctcttctcctgaaagtcttaaacccacaccagctcctgggtcccgtcgagagatttcttcttcacccacatctaagaatcgctcgcatggcagagcaaagcgggataaatctcattctcataccccatctcatagagcagggaggtctcgtagtcctgccactaagaggggacggtctcgatctagaacccccaccaagagaggtcactccaggtcccggtcccctcagtggagaaggtcaagatctgcacagaggtggggaaaatctagaagtccccagaggcgtggccgttcaaggtctcctcagaggccaggctggtccaggagcagaaatacccagagaagaggcaggtctaggtcagcaaggcgaggcagatcacattctagatctccagctactaggggcagatcccgatctagaacaccagctagaaggggtaggtctcggtccagaacaccagccaggcgaagatcacgatccagaacacctgccaggcgtaggtctcggtctagaacaccagctcgcaggggcaggtccagatcaagaacacccactcgccgcaggtctaggacacgatcaccagttcgaaggaggtctcggagtagatcccaagctaggagaagtggtaggtctaggtccagaacaccagccaggagaagtggcaggtcaagatctagaacaccagccaggagagggaggtcccggtctagaacgccagccagaagaagcgctcgatctcggtctagaacgccagccaggagagggaggtcacgatccagaacaccagcacgacgacgatctcgaagtagaagtcttgtgagacgtggaagatctcactctagaacaccacaaagaagaggacgatctggctcatcctcagagaggaagaacaaatctagaacatctcagaggagaagcagatccaactcaagcccagaaatgaaaaaatctcacgtttcctcaagacggagcaggtctctttcttcaccacgatccaaagcaaaatctttgaggcgaagcctttcaggttcctctccatgtcctaaacaaaagtcacagacaccaaccaggcgaagtcgttctggttcttcaccacctaaacaaaagtcaaaaacaccaccaagacagagtcgttcaaattctcctcagcctaaagtaaaatctggaacaccaccaagaccagggtctgtaacaaacatgcaggctgatgaatgcactgcaacaccacagagacagagccattctgaatcatcacctgatggtgaggtgaaatcaaggaccccatcaagacaaagctgctctgggtcttctcctcgagtgaaatctagcacacctccaagacagagcccatctaggtcgtcatctccacaacccaaagtgaagacagtgatatcaccaagaggaagaagccattctagctcctcttctccaagtcctagtagagtgacatctaggacacctcagaggaaaagcagatcagtatctccttgccccaaggtagactctagattaagacatagccgttctagatcctcctcaccagattccaagatggaactgggaacaccactgagacactcaggatctacatctccatatccaaaaagcatgctccagactccaccagatcaaaatctttctggatcaaagtcaccctgtccccagaagtctagggattcaccaacaggaagctctggatcttttcacctctgtccaggtgtaacacctagtagtatagtaccaggagagagctgttttagtgcctcatttgtgcaacaaaaaggacacactcaaacttggccagatacttcaagtccagaagtcatgcagactcaagtggaatctccattgctgcagagcaaatcccaaacatctcctaagggtagcctttccagatcttcatctccagtcactgagctgacagccagatcaccagtaaaacaagataaaagtgaaatatcaacagatccaaagctgaagtcaggaatgtctcctgagcagagtaagactaaacctgactctagcatatatcctttagtagactctaaatcttttctggtgcagagcagattggagccttctgaattaaaagagagactgggtttaattcaagaggatgttgcatcatcttgtataccaagagacaaatttagtcctacacaggataggcctgagtcttccacagtactgaaagtcacacctagagtactattaaaagaaagaagtggagctggctcacctccaggcaaaagagaccaaaaaagtttattacctaattcaagtcaagatgaactaatggaagtagaaaagtctgagcaacctttaagccaagttctacccagtttatctccagaacataaagaaatgcctggaagtaacattgagtcatctcctgaagtagaagaaaggcctgctgtattgtctgctcttgaccaaagccagtcacagccttcaaaagcagcaggaacccctgcagtggcttcatgttggagtgggccacaagtttctccagagcataaagaactatctcattctcccccaagggagaatagctttgagtcatctttagagtttaaaaactcaggccctgtttcagaagtaaatactggcttttctcctgaggttaaagaagaattgaatggatcattccttaatcaaacagaggcagatccatctgtggacatgaaagaacagtcaaggtcttccaggcgaagcagttctgagttatccccagaagtagtggaaaaggtaggattattttcaagtcagaaagtatcttcgcctgtacttgagactgtacaacaaagaacaccttcaagagaaagaagtagttctgcatctcctgaactgaaagatggtttgcctagaacgccatctaggagaagccggtctgggtcttctccaggacttagagatgggtctgggactccttctaggcatagcctatctgggtcctctcctgggatgaaagatacacctcaaaccccctccaggggacgaagtgaatgtgactcttctccagaaccaaaagcattgcctcagactcctagagcccgaagtcattctccatcatccccagagcgcaacaacaagagtgtcacccctcagagagaaagaagtgggtcagaatcatcagtagaacagaaaaatctggctaggacctctccgggacaaagaagtcgatctgggtcttcccaagagcttgatggaaagcccagcgcgtccccacaggaaagaagtgagtcagactcttctccagattccaaacccaagactcggactcctctcagacagaggagtcactctggatcatctccagaggttgacagcaaatctcgacactcacccaggctcagtaggtctggctcatctccagaaatgaaagataagccaagagtgctacagagggctcagagtggtactgattcttctcctgaacacaagatacctgctcctcgggccctgcccaggcatagtagatcaggttcatcaagcaaagagagaggtccttcccctgaaggaagcagtagttctgagtcttctccagaacacgcccccaaatccagaactgctcgaagaggttccaggtcctcaatagagccaaagacaaagtctcgcacaccacctcgacgccggagctctcgatcatctcctgagctaaccaggaaggctagagtctctcgtagaagccggtctgcctcctcatcaccagaaatccgctccagaactccaccaagacgcagaagaagtccttcagtatcttcaccagagccaactgaaaagtcaaggtcttcacggaggaggcgctcagtttcttctccccgtaccaagacaacttcgaggagaggacggtctccttcacccaaacctcgtggactccaaagatcccgatcccgctcacggagagagaaaaccagaacaacccgacgcagagatagatctggatcatctcagtcaacatctcgaagaagacagaggagccggtctagatcacgagttactcggagacggaggggtggctctggttaccattcaagatcacctaccagacaggagagttctcgaacctcctctagacgcagaagaggccgctcccggacacccttgaccagtcggaagcgatctcgatcaagaacatcaccagctccttggaagcgctctagatctcgagcctcaccagctactcatcggcggtccaggtccataacaccactgataagccgacgtaggtccagatctcggacctcacctgtgagtaggagacggtcaaggtcagtgaataggcgtagatctcgatcaagagcatccccagtgagtcgaaggcgatccaggtccagaacaccaccagtaactcgtcgtcgttcaagatccagaacaccaactcgccgtcgttctcgttctaggactcctccagtgactcgcagaaggtccagatccaggactccaccagtaaccaggaggcgatctagaagcagaacttcacctgttactagaagaagatcaagatccaggacatccccagtcacccggagaagatcgagatctcgaacatctccagtcacccggaggcggtcccgttcccgaacctctccagtaacaagacgacgctccaggtctcgaactccgccagcaattcgaagacgatctaggtctcggacaccactgttgccacgcaagcgctctcgaagccgctcaccacttgctatccgccgccgttctaggtctcgtactcctagggcagctcgaggcaagcggtccttaacaagatctcctccagccattcgtaggcggtctgcatctggaagtagttctgatcgttcacgttctgccactcctccagcaacaaggaatcattctggatctcggacacctcctgtagcactcagtagctctagaatgagttgctttagccgtcctagcatgtcaccaactcctcttgaccgatgtagatcacctggaatgcttgaaccccttggaagcgctagaacgcccatgtctgtgctacagcaaacaggtggctccatgatggatggtccaggtcctcggattcctgatcacccaagatcatctgttccagaaaaccatgctcagtctagaattgcacttgccttgacagccatcagtcttggtactgcccggccacctccatccatgtctgctgctggccttgctgcaagaatgtcccaggttccagcacctgtacctctcatgagccttagaacagccccagctgctaaccttgccagcaggattccagcagcatctgcagcagctatgaaccttgctagtgccaggacatctgctattccggcatctgtgaaccttgctgactcaagaacaccagctgctgcagcagctatgaacttagccagccctagaacagcagtggctccttcagctgtgaaccttgcagatcctcgaacccctgcagcttcagctgtgaacctagcaggagctagaacaccagctgcattagcagctttgagtctcacaggctctgggacacctccaactgctgcaaattacccctccagttccagaacaccccaggctccaacccccgcaaacctggtggtgggtcctcgatctgcgcatggcacagctcctgtgaatattgctggctctagaacccctgcaggcttggctcccacaaatctctccagttccaggatggctccagcattgtctggtgcaaacctcaccagtcccagggtgcccctttctgcttatgatcgtgttagtggcagaacctcacctttaatgcttgatcgagccaggtccagaacaccaccatctgccccaagccagtctagaatgacctctgagcgtgagcgggctccttcccctgcttcaagaatggttcaggcttcttcgcaatctcttctccctcctgcacaggatcggcctcggtcccctgtgccatctgctttttcagaccaatctcgttcagttgcccagaccactcctgtagcagggtctcagtccctttcatccgggacagtagcgaagtccacatcctctgctagtgaccacaatggcatgctttctggccctgcccctgggatatcccatgctgaaggtggggagccacctgcctctactggggcccagcagccttctacattggctgctctgcaaccagctaaggaacgtcggagctcttcctcctcttcatcatcatctagctcctcctcctcttcatcatcttcatcgtcatcctcctcttcctctggctccagttctagtgattcagagggttccagccttccagctcaacctgaggtggcactgaaaagggttcccagccccaccccagtcccaaaggaggctattagagagggacgtcctcaggaaccaaccccggccaaaaggaagaggcgctctagcagctccagttccagctcctcctcctcctcctcttcctcttcttcctcttcctcctcctcctcatcttcctcctcctcttcttcctcttcctcctcctcttcctcctcctcttcctcctccccctcccctgctaagcctggccctcaggcattacccaaacctgcaagccccaagaagccaccccctggcgagagggggtctcgaagtcctcggaagccaatagactcccttcgggattcccgatccctcagttactcacccgttgagcgtcgacagccctcgccccaaccttcaccaagggatctacagagcagtgagcgagtttcctggagaggccagcgaggggacagtcactctcctggtcacaagaggaaggagacacctagtccccgttctaatcgtcaccgctcctccaggtctccataatctggattccactacacctcatactctggagacatgagtattcctcatttttcccagaagaatcatggaaggagtctttgtatgccttcccttgaaccttggcagcatcttgaggggagagcgtcctctcccacccacccttttttttttttttttggttcctgtgaaatgttgatctctgtgagtttttcctggttcttgtgttttgggggttggagtgggagggagggagtctagggagggaggggcacagctcaggacatctaggcctcagattgtgatgatccagggagttagctccctaaattcttgggtgactgatggtttaacttggtaagttgtaatctttcctgaaagaggaaggagctgaagttggttggccctgctgcaccccctgacaaggttgtgaggccctcttcccccccaactttgtttaaggcattttggttttttaaaatctgtacagtaaaagcaactttttctgtcaaataaaaatgagaaatgc

SEQ ID NO: 257 - DNA, 957 bp, Mus musculus
atgcagtttataaaacaaagaagaatggaggttggaaactgttcagccactgagtttcttctcttgggaattaccaataatcctgtgatcaaggtgattttatttactacttttctaattgtttatctcataattcttattgaaaatcttgggatgatcattttgataagaatgaactcccagcttcacacaccgatgtacttttttctcagccacctctctttctctgatatctgttattctactgcagttggacccaagatgttggtgggccttatattcaagaacaattcaattccatttattgactgtgctgtgcagttctttatcttctgcatttttaccgatgctgagtgtgtgctactggcagtgatggcttttgacaggtataaggccatcagcaaccccttgatgtatgcggtagatatgtccagagtggtatgctatcagctcctggctgtggtttatctggttggaatggtagatgctttgacacatacaacgttgacatttcacttgtgtttctgtcagtccaaagaaatcaaccatttcttctgtgatgttcctcctctcctattactatcttgttcagatacagaggtcaatgaactagttatattcaccctatttgggtttattgagctgagcaccatctcgggagtcctggtctcttactgttacatcatctcatcagttttgaagattcgctctgctgagggcagattcaaagcattctccacctgtacctcccatctaactgttgttgcaattttccagggaacaatgctcttcatgtatttccggccaagttctgcttattccctggatcaagacaaaatgacctcattattctatactcttgtgatccccatgctcaacccgttgatttacagcctcaggaataaggatgttaaagcaagtgtaaaaaggtccctgcaaagtagaatttcattttaa

SEQ ID NO: 258 - DNA, 6470 bp, Mus musculus
ctcgagtctcgctgcctcccgggagtgccgtgcgccgcagcccgggcccaggccccggcagcgcctgggtcaaggattcctcatgtccgtaacatgttggctgaggctctgcagttcacccccactctttgagtggtcagtctccattaattggaccccgtgattcccaccttctgctgtcttggacgtcatgagcattgcaatccctctgggagtcaccacaccagatacttcctactcagatatggctgctggatcagaccctgaatctgtggaggctagtccagcagttaatgagaagagcgtgtattccactcataattatgggaccactcagaggcatgggtgtcgaggactgccttatgctacgatcatccctcgttctgacctgaatggcctgccgtcgcccgtagaggaacgctgtggagacagcccgaactctgaaggagagactgttcctacctggtgtccttgtggtctttctcaggatggcttccttctcaactgtgacaagtgcaggggaatgagcagggggaaggttattagacttcatcggcggaagcaggacaacatatcaggtggggatagcagtgcaacagaaagctgggatgaggagctttctccttccactgtgttgtacacagcaacacagcacacacctacaagcatcaccttaactgttagaagaaccaaacccaagaagcggaaaaagagtccagaaaagggtcgtgcagcaccaaagacgaagaagatcaagaattctccctcggaagcacagaatttagatgaaaataccactgagggctgggaaaatcggataagactatggactgatcaatatgaagaagctttcactaatcagtacagtgcagatgtacagaatgcccttgagcaacatctccattctaacaaggaatttgtgggcaaacctgcaattttagacactattaataaaactgaactggcctgtaataatacagtaatcggttcccaaatgcagttacagctgggaagagtcactcgtgttcaaaagcaccggaaaatcctgagggctgcaagagatttggctttggacactcttataatagaatatcgtgggaaagtcatgttacgacaacaatttgaggtcaatgggcatttctttaaaaaaccatatccctttgtgctcttctactcaaaattcaatggtgtagagatgtgtgtcgatgctcgtactttcggtaatgatgctcggttcatcagaagatcatgtacaccaaatgcagaggtgagacacatgattgcagatgggatgattcacttgtgtatctatgccgtatctgctatcaccaaggatgcagaagtcaccattgcatttgattatgaatatagtaactgtaattacaaagtggactgtgcttgtcacaagggaaaccggaattgccctatacagaaaagaaatcccaatgctgcagaattgccactcccacctcctcctagctttcccaccattggagcagagaccagacgtagaaaagcacggcggaaagagctggagctggagcagcaaaatgaggttccagaagagaatcctgacccgcaaccacaagaagttccagaaaaagtaactgtatccaatgagcatgaggaagttgacaatccagaagaaaaaccagaagaagaagaaaaagaagaggctacagatgaccaggagaactctgctcatagcagaaggactcgagaagaccgaaaggttgaagccatcatgcatgcttttgaatctttagagaagagaaagaaacggcgggatcagcctgtagaacagagcagctcggacatagagattactactagcagttcagagatagtagttggagaagagacaaaaactgcagcccctgagtctgaagttagcagccctgtttcaaatgttgctatcccaagcaccccacagagcactggtgtgaatactcggaggtcctcccatgctggggatgtagctgcagaaaagccaatccctaaaccacctccagctaagccttctagaccccgaccgaaaagtagaatttctcggtaccggaccagttcagcccaaagactaaaacgccagaagcaggccattgcacaacaggcagaactgtcgcaagctgccttggaagaaggaggaagtaacaactcagtaactcctcctgaagctggaaatacagacagttcaggagagaacagacagctaacagggtctgacccaactgtgatatcagttactggatcccatgtcaaccgtgctgcatctaaataccccaaaaccaaaaagtatctagttacagaatggttaaatgacaaggcagagaagcaagaatgccctgttgagtgtcctttgcgtatcaccactgacccaactgtgttggcaacaaccctgaacatgctaccaggtcttattcattccccattaatttgtaccacccccaaacactacattcgctttggctcaccctttatgcctgagaggcgtcgaaggccccttctgcctgatggcacattcagctcctgtaagaagcgctggataaagcaagccttggaagaagggatgactcagacttcatctgtgccccaagagactagaacacagcacctataccaaagtaatgagactagtaattcttctagtatctgtaaagacaatgcagacttactgagcccattaaagaaatggaagtctcgctatctgatggagcagaatatcaccaagttgcttcagcctctgtctccagttacaccacccccacccagctcaggctcaaagagtccccagctgaccacacctggccagactcacccaggagaagaggagtgtcgaaatggatacagcctcatgttctcaccaatcacatctcttactactgctagtcgttccaacactcctctgcagtttgagctttgtcaccgaaaagacctagatttgacaaaagtgggattcccagactccagcactcacagctgcgctgataggccctccctgcttaactgcaatcatcctgacctggcttctcatccctctgttgttcccacctccgaggctggcttcccaagcaggagtggagatggtcctcagaccttgctgagaaactcagaccaggcgtttaggacagagttcaatttgatgtacgcctactcccctttgaatgctatgcctcgagcagatggactgtatagagggtctcccttggtgggagacaggaagcctttacatttagatggaggatattgttcccctgctgaaggcttttccagcagatatgaacatggctttatgaaagacctctctcggggatccatgtcacctggtggtgaaaggacctgtgaaggagtcccatctgctcctcagaacccaccgcaaaggaaaaaggtatccttgctagagtaccgcaaaagaaaacaagaagctaaggagaattctggtgggggaaatgactcttcacagagcaaaagcaagtcttcaggagctgggcaaggcagcagtaactctgtttctgacactggtgcccatggtgtgcagggatcctcagccggaaccccgtcatcccctcacaaaaaattttccccgtctcattcctctgcatcgcatttggaggcggtaagcccgtcagattccaggggcacttcttcctctcactgcagacctcaagaaaacatcagcagtaggtggatggttcctacatcagttgaacgactccgagaaggaggtagcatccctaaggttcttcgaagcagtgtgagagttgcccagaagggagagccttctccaacatgggagagtaacatcacagagaaagagtcagaccctgcagatggagaaggcccagagccattgagctcagcactctctaaaggagcaactgtttacagcccttccagatatagctaccagctcctgcagtgtgacagtccacggacagaatcacaaagcctccttcagcagagttcgtccccctttagaggacatcccacccaatctccaggatacagttatcgaactactgcactgagacctggaaaccctccctctcacggttcttcagaatcctccctctcttccacgtcctaccccagccctgcccaccctgtgtctacagactcgttggccccatttacggggactccagggtattacagcagccagccgcattctggaaacagcactggcagcaatcttccaaggaggagctgttcttcaagtgctgctagccctaccccacagggcccctcagactcaccgacctcagactcggtttctcagtccagcacaggaactctgagttccacctcctttcctcagaactctaggtcttcattgccatcagacttacggactatcagtctgcccaatgctgggcagtcagctgcctaccaggcctccagggtatctgcggtttccaattcacagcactacccacatcgtggtagtgggggtgtacaccagtaccgactccagccactgcaagggtcaggagtcaagactcagacaggactttcctagggcttctggatatgggcaaactgaacttaatgagcccatagctgcttccttccagctgcctctggaatcaaggccgagcatatcgctggggaagaggggtacaaggtgccagaggaatgggtctggtcagcaagaaatgagacttgtggtcatgactggcctccggccttggagaaagatgtaaatcttgtctgaagcagagactataaagaagtttctccctgctgttaagggtacattgttaacaagcaaatggtgtttcggttagtaacggttctaagtgcaatgacttgtgttgaagcctatgtctcccatccttgcctgtagcctgtagtcacttgtgcagtgaggacatctttttcaataatttttttttttttcttttcaaaagaaaaaagtgggaaagagccaatcttaaagccccaagccatctgagtagtgttagggttttatgcacttaagggaaaaaaaggtaggtatgtaaatgtctgctgtgagacaaccattcctaatgcagatgcatggtcaaggtgtgtccacctggagtgctccctgcctttgtcttaaagccaccaggaaatgggcagggagaggaatgtgggtgcctactctgactgaggcttgcccggctctctgagaggaggagctcctgggtatttgggagcagatttgggatggactgggctccagctgttaccatccactcctccttccaagttgtttcacagtttaatgatagccctgtgaagtagagaagtgaggcaggccagtttaggaaacatccagtggtctgggtaatctttgaattttaattttcctattcccagttaatcaggagttgctgtcctaagagcaggacggcctccgtgactgaaaagcatgcactcatgactgcagggtaagaatgggacagatagggttgcggagtggcaccgacagggctgtgattgtgtgtggggcatacctgccccacgtttctatggggaatgcttatatgacagtgagcaggtgagagttagcaagtcacccatacccctaacactgttctgtaggagagacaaagagcagactggcttctccccatcagtgcattgtgcctgttgtacacccctggaggagccctgaagccagcccaggtggggtacacaatctttttaaattccatatggttgccagcttatttctttcacttgtttactgtaatacctggcgtgtttttatttatctaattttgtattcagctataaccatggtagggtagtgagtgtatgacagtgtgatccctggtgctgcagtggaccgtacttcttttggacaagatatactgtgagtctccctccttacctctaattgttttctttcccattccctagactctttcatctccttttctaccctgacctacaactatcatatgcacagtcttctctctttgtgtgtgactgttacaaattttcacttttcaaaattgaaatcaggtgtttgctcaaatgaggggagaattttttttttgttttggttttatttgtttttaatgctgaaccctcggcatagtactttctgttgttttccccacaaacccatcagtctgggagagcattgggagtggaaatcatgttgcctgggatgctggtttctttgtatattatataaaacgtatgtaaatgtctctccatttgggctggggtttgcattctcccattggctaaaagccaaggggagaggccagcgggcaggcggccctcaccctgcctggcacgtgcagagaccccagccactctgtgtgggcagggtgctgtcaagaccagacctctgggggggagggtggggggaggggggactcttggaagggaaggagcaccacttcttcctcaagtggagtgtttacaccttgctgtaacatttgaactttcacaagagatgtaataattttgataataaaattcttaaccat

SEQ ID NO: 259 - DNA, 3541 bp, Mus musculus
gccgggggctcggtgagcagggcggcagacggggcgcaccccggccaggctcacatggacctcccgcgccgctggctctttcggatgttgttgctcgttgccaccagctctgggatcctcctcatgctgtactcctcggcggggcagcagtcccctgagacccaggttcccgccaggaacatggcgtacccacgagcattctttgaccccaaaccaccgaattcggaaaacagaaagagccgactttgccaacactcgctgtccctggccattcagaaggaccgtcgcttccgcagcctgtttgacctctccaccccggtgctgctgtgggagggcctcttcactcaggaactctggaataatctgagccagcacaaagtcccctacggatggcaggggctctcccacgaagtcattgcctctaccctgagacttctgaaaagcccggagagcggggagctgtttggtgcccccaggaaactacctctaagctgtattcgctgtgccgtggtgggtaacggaggtattctgaatgggtcccggcagggccagaaaatcgatgctcatgactatgtcttcagactcaatggcgccataaccgaaggctttgagcgcgacgtgggcactaagacctccttctacggtttcaccgtgaacaccatgaagaactcgctcatctcctacgccaaactgggcttcacctctgtgccacaagggcagaacctgcgctacatcttcatcccctccagcatccgtgactacctgatgctgagatccgccatcctgggtgtgcctgttccagaaggtcctgataaaggggacaggcctcacacctattttggaccggaaacctctgccagtaaattcaagctcctgcacccagacttcatcagctacctgacagagaggtttctgaaatccaagctgattaacacacgatttggagacatgtatatgcctagcacgggagcgctcatgctgctgacagccttgcacacctgtgaccaggtcagtgcctacggattcatcacaaacaactaccagaaatactcagaccactatttcgaacgagaaaagaaaccactgatattctacgcaaaccacgacctgtccctggaagcttcgctatggcgagacctgcacaacgccggcatcctttggctgtaccaacgctgaccccaaagtaccggatttctgtgcctcaaaagcactttttttgacctttcaacttctggaagaggcaacactccccttggccctctacttcccaacagagggtattgagacaagacccgtcacataataccagagcctgttcaatgcacgacactgtcacgggtcaagacaactcttctgaggcttagccgagggagggaagactgctttgtaggattcgttttaaaactgaacattaaatgagacaatgatgctcaccagcaaacaggcgggcaggcacatctcagagctaagtagtccaaagccagcacctggccctgggcaactagaaacattgatggaaccactcagggctatccaggaacctcgatcgagcagagctgaaaccaatggcatgttgagtcccaaatgccaaagccattcaacctagaacaccttaggcattataggaacaggacacttctgcctcctgatagaggatgagaaacagaggcagaatgtagtttgaagctagataatagggtgtgatggatgaccattttgtcttttttgtgttggtagagtagaagacacaaactccaaggtggtgtgtctggagggaaggggtgtggtggcactcaggacagagtttggtggcacctgcaccgaggttcaggctaggagtacctagcaccaaagagacaaactttgtgtaagtcgccaccactgagtctcactggagaggcacatcagtccttgtcaccaacaggaaactgagtgatggaccctcacttcacagcttcaataaacagcacctgatgcagtccaatgagcttttccacatttccagtctcatccaaccaaattatcatgcagcccctaagctgaagggctgggacggggactgggtatctctagggactaaggaccagataacctcaaaacagcccacccacactggccaactcaccaaagctgaggaccggccgaccattggttctgtggcttgggaaaactgctggtgacggctgggagtggtggtcagcgcacttattcccagtactcaggaagggcgaacagaccagcctagggcatctaacagactaaaaccaagcccaagtggcaatggtggcttccatcttgaccacaacagaaggggctaagtcggataatggcttgagacccagtctggggtacagagcaagtcagcctgggagttggttagccgtaaaaaccacagcctcttgcagcaggagtcgaatggctgtcctaccttttgacggactccatcagatagccctgtcagttctgcagactacccgtagaccctcagtacactccccatcaaatgtgcagacacacgagtgtcctttaccaatgctccatttaagagctattgtttatacatgaggttttgcctgttgtgttggcctgtgcattacatgcctggtacccaggatgtgtccaccaaaggatcccttaaggctagggttaccgatggctctgagcaccatgtaggtgctggcaattgaacccaggtgttctgcaagagtagcctgtgccctccagcacattaccaccggatggttgaggtgttatgcaatgttaacctatgctttaagtgacaagtaaattttagcaagtcaatagaaaaggtctgattctctacagttcagtgcaagtggtccttaagtatttctaaggctcactcatatacccacaatgctaccaagttaaattttataaagtttatttgtgcttcaaaatacaaaggccaaccctgacttccaggaaatccactgtgagaaatgcttttctcggcttagcaggggcctccccagggcctccgactgagcgccctcaccagctagctgtcaaaggcttccgagggtgaccacagtcacgaggccttactggctcctcttgcagaacaaactccaaggtcgtctgatgactctttgggaaattaaaggcaggagcagcagcaggctatgtggttctctctggcactacagggcaataacctagaaacaaggaaagaacctgaaggagacaggcagctaagtgatcaaaactacaaactttaggaacaagcattatcagatagtcctgggatttcagccgccatcacaaggcactgtgtgcgctacacacaggcaggcaccagccaagttcagaagcaggctgctaactttttttttaaaagaaagttttaagaagttcctggtagggctggtgagatggctcagtgggtaagagcacccgactgctcttccgaaggtccagagttcaaatcccagcaaccacatggtggctcacaaccatccgtaatgagatctggcgccctcttctggagtgtctgaagacagctacagtgtacttataa

SEQ ID NO: 260 - DNA, 2448 bp, Mus musculus
gtccggggctgaattggcgcgagcgcggcgccgggggctggctggggcgcggggccccgggctggcggcttgccagcgctccctccctagcatgcacacagaggcggtgggcggcgcggcgcggaggccccagaagctgcgaagccaagcagcggcacctgcctgccgaggtacgtggcgcagcccccagtcggcagagcggacaccggggagcccagatagcggcgatccgcctttgcgataccccaggcccagcggctcctccccagccctgcgacgccggacgcgcctgctaggggacacgggcggagggtcgcggcccctggctgcctacatgggcgcccccggcgcagcctgcgcaggtgtggacgcggcgctgcggcaatgccaagtgagttcacctctgcaaagctgagaagtgattgctcaaggacctccctgcaatggtacacccgaacccagcacaagatgagaagacccagcttgttaataaaagacatctgcaagtgcacgttggttgcatttggagtctggctcctgtacatcctcattttgaattacaccgctgaagaatgtgacatgaaaagaatgcactatgtggaccctgaccggataaagagagctcagagctatgctcaggaagtcttgcagaaggaatgtcggcccaggtacgcgaagacggctatggctctgttatttgaggacaggtacagcatcaacttggagccttttgtgcagaaggtccccacggccagtgaagctgagctcaagtatgacccgccttttggattccggaagttctccagtaaagtccagagcctcttggatatgctgcccgaacatgactttcctgaacacttgagagccaaggcctgcaagcgctgtgtggttgttgggaacgggggcatcctgcacggactagagctgggtcacgccctcaaccagttcgatgtggtaataaggttgaacagtgcgccagttgagggttactctgaacacgttgggaataaaactactataaggatgacttacccagagggtgcgccactgtcggacgttgaatactacgccaatgatttgttcgttactgttttatttaagagtgttgatttcaagtggcttcaagcaatggtaaaaaatgaaagcctgcccttttgggttcgcctcttcttttggaagcaagtggcagaaaaagtcccactccagccaaagcacttcaggattttgaacccagttatcatcaaagaaactgccttcgacatccttcagtactcagagcctcagtcaagattctggggccatgataagaacatccccacgatcggcgtcattgccgttgtcttggctacacatctgtgtgatgaagtcagcctggcaggctttggctacgacctcagtcaacccaggacccctctgcactactttgacagtcagtgcatgggcgccatgcactggcaggtcatgcacaatgtgaccacagagaccaagttcctcctgaagctcctcaaggagggcgtggtggaggacctcagcggcggcatccactgagaactcggaacacggcaaacctcacccagcaccgcagctgagagcgtggtgagcagcctccacagggacttcaccctgcagctgcttcgatgtgcagctagtgttttcaaactccacattttttttaaaaaaggaaaagaaagaacaacagcaacaacaaaagctctgctctgtgcacctcttcgtcctatttatttgaagtcagtgttggattttgcacagttttgtaagttaatcttaagaatgggattggaaggacttttcaaagagaattgtatagtttattgttttttaaggaagtaatttaatttgcagaaactgtacacacgtactctgctcaggtgttgaggtgggaggagaggggcttctggcccctggatgatggctgtgatgcccgatactggggtctgctgctctgtttggtagaactgatggcagagaaacttcctgcctccaggataaagggcttactcatcacctctggcagctgctagacaagttcataacccctttctgctagtccatctgccagctggctcgcaggactcaggcagggcagctgtcccggaggctgctggttggtgagccactgtcagctgagcgccgtgatgttgccccagggtggaagaagccacacttcctacactgtcagggcacttttaaacttctggaggggtgtgtgtgtgtgtgtgtgtgtgtgtgtgtgtgtgtgtgtgtgtgtgtgtgtgttcattctgcccttccaaatcatctaagtgttatttaaggcactctgctgtttgtatgagatggttcatagaaattatgacaaagcctttgttatccaggccatgggaagaggaaaaagaaaagaaagaaagaaaagaataaaagcttttgaggagcccctgtgatttcctg

SEQ ID NO: 261 - DNA, 442 bp, Mus musculus
ggttgtggtggtaactggagggctgagcttgttgggaaccctgtttggcgctgccataggaggagctctggctgtggcaggggcacctatcgccctgagtgccgtgggcttcactggggcaggcattgcagctgggtccatagcagccaagatgatgtctgctgcagcaattgccaatggaggtggagttgcagcaggaagcctggtagccacactccaatcagcaggggtccttggactctccacatcaacaaatgccatcctaggggctgctggggcagctgttggagccttgctctgagcttaggagatgacacttctatcagctcaactcaaagcctgtacagactacgcaggagatgaagttccaaaaggcaccttcagaaccttctttgatgtcaaagaatgatgactccttctaagtatatgggctggtgttcat

SEQ ID NO: 262 - DNA, 2500 bp, Mus musculus
cggccgcggcgcgggctgttcggaccccggccccggccgctgtggtgactcctctgcgcctcgccgtcggcccagcccagcccagtccgcccgcccgcccgccggcccgccggccgcgagcgccgccgccgccgccgccgccacctcccccgccgctggggacatgtctaaccccggaggccggaggaacgggcccgtcaagctgcgcctgacagtactctgtgcaaaaaacttggtgaaaaaggattttttccgtcttcctgatccatttgctaaggtggtagttgatggttctgggcagtgccattctacagatactgtgaagaacacacttgatccaaagtggaatcagcattatgacctgtatatcggaaagtctgattcagttacgatcagcgtatggaatcataagaagatccataagaagcaaggtgctggatttcttggttgtgttcgtcttctttccaatgccatcaaccgcctcaaggacactggttatcagaggttggatttatgcaaactggggccaaatgacaatgatacagttcgagtacaaattgtagtaagtcttcagtccagagaccgaataggcacgggaggacaagttgtggactgtagtcgtttgtttgacaatgatttgccagatggttgggaagaaaggcggactgcctcgggaagaatccagtatctaaaccacatcacaagaactacacagtgggaacgcccaacacgaccggcgtcagaatattctagtcctggcagacccctcagctgctttgtggatgagaatactccaattactggaacaaatggtgcaacgtgtggacattcttcagaccccagactagcagagagaagagtcaggtcccagcgacatagaaattacatgagcaggacacacttacacactcctccagacctaccggaaggctatgaacaaaggacaacgcagcagggtcaggtatatttcttacatactcagactggtgtgagcacatggcatgatccacgagtgcctagggatcttagcaacatcaattgtgaagagctcggtcctttgcctcctggatgggagatccgcaataccgcaacaggaagagtttatttcgttgaccataacaacagaacaacacaatttacagatccccggctctctgctaacttgcatttagttttaaatcgtcagaaccagttgaaagaccaacagcaacagcaagtggtgccattgtgtcccgatgacactgagtgtctgacagtgccaagatacaagcgagatttggttcaaaaactaaaaatcttgcggcaagaactttcccaacagcagcctcaagctggccactgccgtattgaggtgtctagggaagagatttttgaggaatcatatagacaggtcatgaaaatgaggccaaaagatctatggaagcgattaatgataaaatttcgtggagaagaaggtcttgactatggaggagttgccagggaatggttgtatctcctgtcacatgaaatgttgaatccttactatggtctcttccagtattctagagatgatatctacacattgcagatcaatcctgattctgcagttaatccggaacatttatcctatttccactttgttggacggataatgggaatggctgtattccatggacattatattgacggtggcttcacattacctttttataaacagttgcttgggaagtcaattactttggatgacatggagctagttgacccagaccttcataatagtttagtgtggatacttgaaaacgatatcacaggtgttctggaccataccttctgtgttgagcataatgcatatggtgaaataatccagcatgaactcaaaccaaatggcaaaagtatccctgttactgaagaaaataaaaaagaatatgtcaggctttatgtcaactggagatttctccgaggcatcgaagctcagttcctggcgctgcagaagggctttaatgaagtcattccccagcacctgctgaagacatttgatgagaaggagctggagctcattatttgtggacttggcaaaattgatgtgagtgactggaaggtcaacacccggttaaaacactgtaccccagacagcaatgtcgtcaagtggttctggaaagcggtggagttttttgatgaagagagacgagcacggttgctccagtttgtgacagggtcctctcgagtgcctctgcagggcttcaaagcactacaaggtgctgcaggcccacggctctttaccatacaccagattgatgcctgcacgaacaacttgccaaaagcccacacttgcttcaatcgaatagacattccaccctatgaaagctatgagaagctctatgaaaagctgctaacggccatcgaggagacatgtggctttgctgtggaatgatgggcaccaaggacttacctacagctcttatttattccctggccaacagcctccttcagcagcgcttcagagaacgctgggatacaggac

SEQ ID NO: 263 - DNA, 6140 bp, Mus musculus
ccgactttactgtcccagagcctagactgcccgccccggaggacgtggaggacgaggcagcccgcgggagagacagctgtgggggccctggcagcgacctcgcgcagctcgtaccctgtcactcagcatcccaatcggtgttgcgcccgcgcccgccccctgcccgaggggcggggctggtcttgtggtacccagagtctgcgcacgctgaggtgtgcccctgcccagtgaggacctgggactgggccatgccagccccagaccatcaaggtgggaagaggaccgcatcccagagccggtgagcaacccgcagctttggccgctccagagaagttccgcaccctccaggagtgaagatgaaagagatttgcaggatctgtgcccgggagctgtgtggaaaccagcggcgttggatctttcataccgcgtccaagctcaacctccaggttctgctttcgcacgtcctaggcaaagatgtctctcgtgatggcaaagccgagtttgcttgtagcaagtgcgctttcatgctcgatcgcatctatcgattcgatactgtcattgccaggatcgaagccctttctcttgagcgcttacagaagctgctcctggaaaaggatcgcctcaagttctgcattgccagtatgtatcggaagaataatgatgactctggcgaggagaacaaggcggggagtgggacagtagacatttccggcttgccagatatgaggtacgctgcgctgctccaagaagactttgcctattcgggatttgagtgttgggtagaaaatgaggatcagattaacgactcacacagctgtcatgcttccgaagggcccggaaaccgacccaggagatgtcgcggttgtgcagctctgcgggttgcggattccgactatgaagccatttgtaaggtgcctcgaaaagtggcccgaagtatttcttatgccccctctagcaggtggtctaccagcatttgcactgaagaaccggcattgtcagaggttgggccaccagacttagcaagcacaaaagtacccccggatggagaaagcatggaggaagggacaccaggttcctccgtggagtctctggatgctagtgtccaggctagtcctccacaacagaaagacgaggaaacggagagaagtgcgaaagaacttgtaaagtgtgactactgttctgacgaacaggctccacagcatttgtgtaaccacaaactggagctagctcttagcatgattaaaggtcttgattataagcccattcagagtcccagagggagcaagcttcctattccagtgaaatccatcctacctggagccaagcctggccatatcctgacaaacggagttagttccagtttccttaacaggcctttgaaacccctttacaggacgcctgtgagctatccttgggagatttcagacggacaggagctgtgggatgatctctgtgatgagtatttgccgatcgggttccagcccgtgcctaaagggttacccacgcaacagaagccggacttgcatgagacccctacaacccagccacctgtgtctgagtcccacctggcagaactccaggacaaaatccagcaaacagaggccaccaacaagattcttcaagagaaactgaatgacctgagctgtgagctgaaatctgcacaggagtcatctcagaagcaagatacgacaatccagagcctcaaggaaatgcttaaaagcagggaaagtgagactgaggagctgtaccaggtgatcgaaggacaaaatgacacaatggcaaagcttcgggaaatgctgcaccagagccagctcggacagctccacagctcagagggcattgcccctgctcagcaacaggtagccctgcttgaccttcagagcgctctattctgcagccagcttgaaatacagaggctccagaggctggtccggcagaaagaacgccagctggcggatggcaagcgatgtgtgcagttagtggaggctgcagcccaggagagagagcaccagaaggaagctgcttggaaacataaccaggaattacgaaaggctttacagcacctccaaggagaactgcacagcaagagccagcagctccatgttctggaggcggaaaaatacaatgagattcgaacccagggacaaaacatccaacacctaagtcacagtctgagtcacaaagagcagctaattcaggaactccaggagctcctacagtatcgtgacaacgcagacaaaactctagacacaaacgaagtgtttcttgagaaattgcggcaacgaatacaagaccgagctgttgctctagagcgggtcatagatgagaagttctctgctctagaagaaaaggacaaggaactgcggcagcttcgcctagctgtgagggaccgagaccatgacttagagagactgcgttgtgtcctgtccgccaatgaagctaccatgcagagcatggagagtctcctgagggccagaggcctggaagtggagcagttaactgccacctgccaaaacctccagtggctgaaagaagaactggaaaccaaatttggccattggcagaaggaacaggagagcatcattcagcaattgcagacatctctacacgacaggaacaaagaagtagaggatctcagcgcaactctgctctgtaaacttggaccgggtcagagtgaagtagctgaggaactgtgccagcgcttgcagcgaaaggaacggatgctgcaggaccttctgagcgatcggaacaaacaagccgtggagcacgagatggagatccaggggctgctccagtcgatgggcaccagggagcaggaaagacaggctgctgcagaaaaaatggtccaggccttcatggaaaggaactcagaactgcaggccctgcgccagtatttaggggggaaggaactaatgacatcgtctcagacgttcatctctaaccagccagctggagtgacgtccatcgggcctcaccacggagagcaaaccgatcaaggttctatgcagatgccctctcgagatgatagcacctcactgactgctagagaggaggccagcataccccggtccacattaggagactcggacacagttgcagggctggagaaagaactgagcaacgccaaggaggagctcgagctcatggccaaaaaagaaagagaaagccagatggaactgtctgccctgcagtccatgatggccatgcaagaggaagagctgcaggtgcaggctgctgacttggagtccctgaccaggaatgtgcagataaaagaagatctcataaaggacctgcagatgcaactggtcgaccctgaagatataccagccatggagcgtcttacccaagaggtcttacttcttcgggaaaaagttgcttccgtggaaccccagggtcaggaagtatcagggaacaagagacagcagttgctgctgatgttagaaggactagtggatgaacggagtcggctcaacgaggccctgcaagctgagaggcaactctacagcagcctggtcaagttccatgcccagccagagaactctgagagagacggaactctgcaggtggaactggaaggggcccaggtgttacgcactcgactagaagaagttcttggaagaagcctggagcgtttaagcaggctggagagcctggccgccattggaggtggggaactggaaagtgtgcaagcccgtcacaagcatgccttctgagcactggcgggtcacactgcgacccaggatggaaaccctgtttatactaaccagaaagctgtgtcggacttgacaaccaagtgtggcttactaatggtaacggtaggactgctgtcagtagcagcaaagggaagcagctggagtcttccttactccctgcacggacctagttcttagctaactgaggtcttgaagcatactgcacatcttaaatcattccattttaatttcccattcatactgctcttctccctggcctgtcctcattcctttaccccttccatgggccaataaagtttactcccccatcttaccacccccgccacaagtcccacgtcatgtcatcaaatgcatgtgtgtgtattatttttgccatccaatcaaatcctgttctttgaaagcaatttttaatcaaataaaggaatcaagtatgagttttaggtttagaaagaaaggtagagagtcccgtgagagtgagtctggggaggggtataaaaccctactaaggataatcagaactagacaggagggtgtgggctgagctcaggagcagagaccgttagtgttccaataaaatttgccctcgaaggcctcttcagagttgactgtctagggaaagatgaagtcagatcagtggacagcatggtctagtccataaaagcctatacaactcatgttcttcactggcctagggtttcttcaagcctcaggcatggcctttagtcagaacatgactttaaaaaccggtttcccaaatcagaatcctctagataaaaaatcatcttctatgtgatatttcccaccctccttttttttattattttggttttgtttttttggtattttatttgtttgtttgagacaggatatcactgtggctggcctgaaatgcactgggtaaaccagactggcattgaactcacagagatgagcctgcttctacctttgggtgctgggattagaggcatggctgccacccctgcctgtcagcatcccccttaagagcaatagtttccaggatccccagatcaggggaagtataattcctggatgctcattaggaggtgaagcgggtggcgtccttcattgacctctgctttggtgggagtaattcttgatagtggagtaagaagacgatgtgagatgctgtcatgttcaggtcactcagaaggaggccttagatctcatgtaggttttactcaccctctctgctttcttgggacaacccgacaggtggggaggtggtagattgttcatttctagcatcttaaatgtcaagaataggaaaagtaacaggttacttgcaaggggctgtggattctgccccagaacctttcctagtgctgaagggtatgagtaacgtaatccatgctttccagcaccctgagaaagactgagcccccttcccgagctacactgagctttcctttcctcttcttatttattttttattttttatttttttgacaaggcacactacatccatgtgttgacatggcatgtgttctaaattctattcaagattctgtaacctcagctgtgtgacacactttaactgatgtgtatccatcagcttgaagtggacaggaggaaaatattctaccagagaagcacttgaaatcttctgatgaagtagttcacaaagattgatagccatggccttccttataatggatgtgctattacagttttacaacctttaggggggaaaggactcatttaatattaaagatagaagatgtagaagcagagccatccaatgttcttagtaaccccattctaagatactctaaggcctgcctgaacaaaccttatgtaactaacaaggaagagcataatagagttgagctatagacatgtcaaacaattaaagaccagcctgttagtcattacaaggcaattaggaaatgtgtttactcaactttaccaatagacaacaaagttctgcaaagctgctattaagtttcaactctagtaatctctagggttctaagggctcacagtgattataataatgaaggttaataattagtgcaactgccaacctctaacaagagtaggttgatagacaagtaaattaagagtttgttatcaattccataaatgtgactataaaatctggtactgactttctggtcctgatgctagaatgaaggtggagaccttgctgcctggagggaatgtgcttggcccacaagcttgtgcaataatttgacacctagctaccgaacacagttctgatgaattgtacagcgtgagccacaggtggatggtactatgattacacgtcattcatatcatataattggatttagcatgctgtaatcttcatttctctgtaggagtatggactatgttagaatgtgtctgcctttgtttggatttttttaatattataataaaataaacttagttttaaagcatcaa

SEQ ID NO: 264 - DNA, 848 bp, Mus musculus
gaaaaggggccttgctgtcagttttctgagagcagcctttgttgtttgggggttctcatgggatccctttagccaacaactcaattagatgtagtacaatcctggtactaaaagctttggttcgatcgggagcggagagcggatcctagagagccctgagagtcccaccgccgccgcccgcctagtcaccatcacacccggaaggagccgcagccctcgccgccggccccagtcaccatcaccgcaaccatgagcagcgaggccgagacccagcagccgcccgccgccctcagcgccgccgacaccaagcccggctccaccggcagcgacgcaggtagtggcggcccgagcagcctcacatcagcggcgtccgccggcggggacaagaaggtcatcgcagcgaaggttttgggaacagtcaaagggttcaaagtaaggaacggatacggtttcatcaacaggaatgacaccaaggaagacatatttgtacaccagactgctataaagaagaataaccccaggaagtaccttcgcagtgtaggcgatggagagactgaggagtttgatgttgttgaaggagaaagcggtgcggaggcagcaaatgttacagaccctggtggagttccagttcaaggcagtaaatacgcagcagaccataatgtttccctttcctcctgcagtttggtgaaaagcaaggaactccttctacccttagaatttccaacattccttcttattcatcagctgcatgcgggtgcttcttcacaacataatctgcttattgtgaacttggtctttttaaaatgtattttgcttttaaatataaaaataaataaaatatttctttt

SEQ ID NO: 265 - DNA, 1655 bp, Mus musculus
ggcacgcattaggctgtggatcagagcaaggcggagggccgtgggcagggaaaactggtgtgctcgcggcgggcatcagtcggcttagcctcgcgcgccgggaccctgcagagaagaacacaccagtcagtttttcaagggaaaatcctgggccaggagccaagtcctgatctctacaaacttaatattgtgtagattattttaccacctgagatctcagtggcctcatctgtgcaagaaagagaaaattaaataataaaaaagataaaaccttggcctgtctgaagatgaggtggaggatcatccaagtacagtactgttttctcttggttccgtgcacgctgaccgctctggaagctgttcctatcgatgtggacaagaccaaagtacacaacactgagccagtggaaaatgcaaggatagagccaccagatactggactttattatgatgaatacctcaagcaagtgattgaagtcttggaaacagatccacatttcagagaaaagctccagaaagcagacatagaggagataaggagcgggaggctgagtcaagagctggacttagtaagtcacaaagtgaggacgagactggatgagctgaagaggcaagaagtaggaagactgcggatgctcatcaaagctaagctggatgcccttcaagacactggcatgaatcaccaccttcttctgaagcagtttgaacacctgaaccaccagaatcctaacacatttgaatccagagatttggatatgctaatcaaagcagctaccgcggatctggagcaatatgaccggactcggcatgaagagtttaagaagtacgagatgatgaaggaacacgagcggagagagtatttaaaaacgctgagtgaggagaagaggaaagaagaagagtctaagtttgaagagatgaagaggaagcacgaagaccaccccaaagttaatcatcccggaagcaaagatcaactaaaagaggtttgggaagagactgatggattggaccctaatgactttgaccccaagacatttttcaaattacatgatgttaacaacgatggattcctggatgaacaagaattagaagcactattcacaagagagttggagaaagtgtataacccacaaaatgcagaggacgatatgatagaaatggaagaggagaggctcaggatgagagaacacgtcatgagtgagattgataacaacaaagaccgattggtgactctggaggaattcctgagagctacagagaagaaagaattcctggagcctgatagctgggagacactggaccagcaacagttattcaccgaggacgagcttaaagagtatgaaagcattattgctatccaagagaacgagcttaagaagagggcggaagagctgcagaaacagaaggaggatctgcagcggcagcacgaccacctcgaggcgcagaagcaggagtatcatcaggccgtccagcacctggaacagaagaaacttcaacaaggcattgctccatcagggccagcgggagagctgaagtttgagccacacacataaagtcctgatgtctgccagaacttggaagaaaaccgttgattcaacatctatttcatctttcaacatcctttcttttctctccactcaataaatactttaaagcac

SEQ ID NO: 266 - DNA, 1742 bp, Mus musculus
ggctgggtggacgacgtggaagttgctggccgaccaggcttggaggagtccgcttcggaaccggagtccgggagtagcggaggtggcggcgcccaggctcaactaggagtcgctgccgagtcccggcctgtctctgaggatcggcgagggcgcggcggcggttcatcatgggtggctttttctcaagtattttttccagtctctttggaaccagagaaatgaggattttaattttgggattagatggtgctggaaaaacaacaattttgtacaggttacaggttggagaagttgttactactattcccactattggatttaatgtggagacggtgacatacaaaaatctcaaattccaagtttgggacttaggaggacagacaagtatcaggccatactggagatgttattattcaaacacagatgcagtcatctatgtcgttgacagttgtgaccgagatcgaattggcatttccaagtctgagttagttgccatgttggaggaagaagagctgagaaaagccattttattggtgtttgcaaataagcaggacatggaacaggccatgacaccctcagaaatggcaaatgctcttgggttacctgccctgaaggaccggaagtggcagatctttaaaacttcagcaaccaaaggcactggccttgatgaggcaatggaatggttagttgaaaccctgaaaagcagacagtgagcccattcacgtcagcgcctgtgagccaacgctacatcacatactcattggaagcagtcaggtgtgcttcctgtgactgctggagctgtgcgattctggcatagacagacctgcctgacttcaatatttgtaataaatataaaaacaagtatttggtgagagggttagcttgattgaatcacccaaatggtttatgtaatgtaaaatatttcttcctggttttcatgtgttaaggtatatattctatttgtatggaattcttactcagatacagttctattaaagaatgtatactcttagggggaaccctcctatttttaaattagtggttgcatcttgtttgtataaacactaatatttagctcagactctttcccccttaaaatgaattaaggctttccaaagattagtcttagcaaagtagattagaaatacagtgtataatcttcatttgcttaactgactagtttattttgttggctcactttactgacttatgttattttacagtacttatacttgtcaaaagaattttgtgtatgttgatctgaactttgtacaggaactctgtaaggaaggtggggttctgctatgttgctttgccaggccctatacagtgaggtagggtagggttcagagtcaggcttgtgggtcagaaacttgtgtcctaaattatactatctccggatataccaacactgggaacatagacacctaggtgtggtggcacacacttgtagtcctagtacttaggagacagaggtgggaagacccaagagttcagctttgtggtgaatctgaggccagcctgggctgcttgagactatgtctcaaaacaaaacaaaaaaacaaccaaccaatcaaaaaaattatgctcaagtagttatggatttcaaagtaatgtttatataaacttgtctatgctagtaaaatgataagggatacggtccacactatcccaaatggctgtttgatgaattcacaacacaatacaaaaccttcacatgaaaagaaataaaaagcaatttt

SEQ ID NO: 267 - DNA, 1479 bp, Mus musculus
gcgactcttttgaatggaatcgggctgattcatcgcctgttctccgagccagtccttgttgagtgtgaggcgctgccttcgccgccgcgtcgccacaaggccaggagagagaggaaaaactacttgtgaaaaattgtatctgccagaattagcaagacttggagttaataacaaatttgtcaaattcaacaaattgaagtttaacactgtaagaattacagttactgaacagaaatatggacagacttcttagacttggaggaggtatgcctggactggccaggccacctacagatgctcctgccgtggacacagcagaacaagtttatatctcttccttggccttgctaaagatgttaaaacatggtcgtgctggagtgcctatggaagttatgggtctaatgcttggtgaatttgttgatgattacaccgtcagagtgattgatgtgtttgctatgccacagtcaggaactggtgtcagtgttgaagcagttgatccagtgttccaagccaaaatgttggatatgctgaaacaaacaggaaggcccgagatggttgttggttggtatcacagtcaccctggctttggctgttggctttctggtgtggatatcaacactcagcagagctttgaagccttgtcggagagagctgtggcagtggttgtggatcccattcagagtgtaaaaggaaaggttgttattgatgccttcagactgatcaatgctaatatgatggtcttaggacatgaaccaagacaaacgacttcaaatctgggccacttaaacaagccatctatccaggcattaattcacggactaaacagacattattactccatcactattaattaccggaaaaatgaactggaacagaagatgctgttaaatttgcataagaagagttggatggaaggattgacacttcaggactacagtgaacactgtaaacacaatgaatcggtggtaaaagaaatgttggaattagccaagaattataataaggctgtggaagaagaagataagatgacacctgaacagctggcaataaagaatgttggcaagcaggatcccaaacgtcatttggaagaacatgtggatgtgcttatgacttcaaatattgtccagtgtttggccgcaatgttggatactgttgtatttaaataaagcgacgtagagagctgtcagtggcgctctgagtgtatcgtccttcttcgttcccaatgctcacagttaagggaactgaaggtgatctggtgatgtgtgagacacctgtgccacctcccatctcagttgtgcactcgcttctgtttattttgtccgggttttgcagattccaaagttgttcaggaatacaacaaagtgaacaaattttgttaagatcccatttactatttgaaaaaaatcagtagcacaaatatattttgattgttgcttacaaaataaaatacatttacaatccaaaaaaaaaaaaaaaaaa

SEQ ID NO: 268 - DNA, 1913 bp, Mus musculus
gcgagaagcagtgacactgagcgggcgcagggggccgagtcggagatcgagcctgcgttcgggagcggcagcagagggggcatagacactcggagcagcctcagcgtctcctcgtcattcctgccgtggcccgcagtgcccgactcttgggttcccactgaagacgctgcgcgctgctgcttggggagggggtgtggagtcggttctgcgaccgcagtggctgtcgtcgggggtcgaccgagcgctgaggtgtggagaacctcgcccggggtcgagccgataacagggttcgggtgtctggtgtgtgaccatcacagggtttgtggatgcacttagatgtttgcaatgagcactgtggctggcatgccccagtattttggataccaatgcataggactccatagtaatcgaatttaccagaggcgaacgtcatgagcatagcgatcccattgggggttgatacaacagaaacatcctacttggaaatggctgcaggctcagaaccggaatccgtagaagctagccctgtggtagttgagaaatccaacagttttccccaccagttatacaccagcagctcccaccactcacatagctacatcggtctgccctatgcggaccataattatggtgctcgtcctcctccaacacctccagcatcccctcctccatcaggtctcattagcaaaaacgaagtaggcatatttaccactcctaattttgatgaaacttccagtgctactacaatcagcacatctgaagatggaagttacggtactgatgtaaccaggtgcatatgtggttttacacatgatgacggatacatgatctgttgtgacaaatgcagtgtttggcaacatattgactgcatggggattgacaggcagcatattcctgatacatacctatgtgaacgttgtcagcccaggagtttggataaagagagggcagtgctactgcaacgccggaaaagagaaaatatgtcagatggtgataccagtgcaactgaaagtggtgatgaagttcctgtggaattatatactgcatttcagcatactccaacttcaatcactttaactgcttccagagttcccaaggttactgataaaagaaggaaaaaaagtggggagaaagaacaaaacttttcaaaatgtaaaaaagcctttcgtgaaggatctaggaaatcatcaagggttaagggttcagcaccagaaattgatccttcatctgatagttcaaattttgtttgggaaacaaaaatcaaagcatggatggatcgttacgaagaagcaaataataaccaatatagtgaaggtgttcagagagaggcacaaagactagctcaaagactcggtagtgggaatgacagcaaagacatgaataaatcagaattgagtaccaacaactcactcttcagacctcctgtagagagccatatacagaagaataaaaaaattctgaaatctgccaaagacttgcctcctgatgcacttatcattgaatatagagggaagtttatgctgagagaacagtttgaagcaaatggatatttctttaaaaggccatacccttttgttttattctactcgaagttccatgggcttgaaatgtgtgttgatgcgaggacttttgggaatgaggctcgattcatcaggcgttcttgtacaccgaatgcagaggtgaggcatgaaattgaagaggggaccatacatctctacatttattctatacagagtattccaaaagggactgaaattaccattgcctttgattttgactacgggaattgcaaatacaaggtggactgtgcatgcctcaaggaaaatccagagtgccctgttctcaagcgaagctcggaatccacagaaaacatcaatagtgggtataaaaaaaaaaaaaaaaaaaaaaaaaaa

SEQ ID NO: 269 - DNA, 2125 bp, Mus musculus
gtttctctcccctccccctcgctggcggactttctccttttccgaccgaggctcgtcgcggcggaaaatctttcccggctgcagccgcccctgacgccgctcgcctcgcctcgcctccccgacccctgcccgccgtcccgaccccagccccacccaagatgtcagaggatctagcaaaacagttggctagctacaaagctcaactccagcaagtagaagctgccctttctggaaatggagaaaatgaagatctattgaaactgaagaaggatttgcaagaagtaatagaactgaccaaagaccttctgtcaactcagccttcggagacgctcgcaagctcagacagttttgcttctactcagcccactcattcatggaaagtaggggacaagtgcatggccgtgtggagtgaagacggacagtgttacgaagcggagattgaagagatagatgaagaaaatggcaccgctgcaatcacctttgctgtttatggcaatgccgaagtgacgccattgctgaacctcaagcctgtagaagaaggaaggaaggcgaaagaggacagcggcaacaaacccatgtcaaaaaaagaaatgatcgcccagcagcgtgaatataaaaagaaaaaagctttgaaaaaagcacagagaataaaagagttggagcaggagcgagaggaccagaaggtgaaatggcagcagttcaacaacagggcgtactccaagaacaagaaaggccaggtaaagaggagtatttttgcttctccagaaagtgtaacgggcaaagttggagtaggaacttgtggaattgctgacaagcccatgacacagtatcaagatacatccaagtacaatgtcaggcatttgatgcctcagtaacctgaaaaactgctgcatttcatctctgcagggctttactttacactctcctttttatccttgtatttttctaaaggtaactgattgcttagatgctgagtaaggaagatacattgttgtcattgtttggctttggtagaatgaaacttgaagacatttgataactgctctcatttaacttcattactacttaccacagcttcctcagtgtgttgaacaaggcaacttttctaggtaagtgctgcttaaatcagcacttagatgacttctgaacgtcaggcccattgaactgatgttgtgtagaccgtttctaagtcctaatttggaattttcagatgctttgcacttgacatattccaacagttcattggaacatggaggcaaaacgccagcctgctaaagagagcttcagttttacaacctggccattgtccagacaagcccaagtataggttaatttataaacggcaaagtttattttgagggtttttttttccttgaattacttatttcctgggcctattgactcactttgtattttttgtcattgagtttgaaatttatattaaaaaaccaaacaaaccatgtttaggatgtgcgccccttctctggtgtttatttggtgttttgtattgttttttcctttgttgacttcacttgtagtggtaccatttttgggatgtgtactgtttctatgggaagacaaaagctgatgtacagccctgtgtacagtgtagatactatttttgtaaaaatacaaggctaaattaatgaacaagagtactcagtgtttcatgattaaattttcctgtatttcttgtgcattaatctgaccataatttccctgtatattatgttcatgtagctgagtttgtaatttttattaacgagatcaagttgccagcatttgttggcataagtgaagcaccacagttatccaagttgagtttaagccaaaacaaaggtagaaaaaagggtcttcctgttaattggaagaaaataatttttagagtgtgtgttaatttcagttttgtatgtttaactttaataaataaagtgtttttaaaatctccagtgtgttaacaaaggggcggagccttagacttgtacacagaactacaatgctaaggctggtaaatggttcacagatccttaagaattccttcattgggtataagaaatggagtcataaaggattaattaatgggcatgtatgcgattatttgtaaattaaattactttgtaaattt

SEQ ID NO: 270 - DNA, 1458 bp, Mus musculus
acctaaaggagtgtgggttcgagagcagcttcaaggacaagtcagactgtgacttccccaagaacctggagccctgggaacggccccatgcagcgcgggaaaaggagaaaaaggatgccctggaaaaggaaaggaaggaaaagggcagggcagacaagtacaaagagaagtccagcgagagggagagaagtgacaagtccacccttgacaagtgtcagaaagacaaagaatttgaaaaatgctttaaagagaagaaagacggcaaggaaaagcataaagacatacacagcaaagacagaaaagcatcctttgaccaactgagagagaagaaggagaaggtgttctctagcatcatctcagaagacttctcagagagaaaggatgacaggaaggggaaggagaagagctggtacattgcagacattttcacagatgagagcgaggacgagaaggacgattgcgtggccggcagcttcaaggccacagaggccagcgacacccagcgagtggacggcctcccagaaaaggaggaaggacgagaacacccctcggacaggcaccggaagtcctcttctgacaggcagcacacagagaagccaagagacaaagagcccaaggaaaagaagaaggacagaggagcttcggaaggaggaaaggacaagaaggaaaaaatggaaaagatctttgagaagcacaaagaaaagaaagacaaggagtgtgcagagagatacaaggacaggaaagagcgagcctcggctgactctgccccagaaaagaaaaacaaacagaagctccccgaaaaggtagagaagaagcacttcgctgaggacaaggtgaagagtaaacacaaggagaagccagagaaggagcactcccgggagagggagcggaagccttcccgaggccccgatgtcgagaagagcctgctggagaagctggaggaagaggctctgcacgactaccgggaggactccaacgacaagatcagcgaggtctcctcggacagctttgcggaccacggccaggagcccagcctgagcacgctcctggaagtctccttctctgagcccccagcagaggacaaggccagggacagtgcctgcctctccgagaaactgagggagaaggagaggcatcggcattcctcttcctcctctaagaaaagccacgagcgtgaaagagccaagaaggaaaaggcagaaaagaaggagaagagcgaagactacaaggacagcatcagcagcgtcaggaaggatgccagccagttcgagaaagacttcctggatgcagagacttacggggtttcttaccccacaaaagctgacgtggaggaggagctggataaggccattgagttgttctcctcagaaaagaaagacaggagtgatcctgaacgagagcctgccaagaggatagagaaggagttaagaccgtacggctcgagtgccatcagcatct

SEQ ID NO: 271 - DNA, 2329 bp, Mus musculus
ccggcctgtgcggatcatgccgcctgcgacgcccctcgcggccgggaaacggtagccgcgacggttggctctcgagttacgctctcctcccgcaccccgccgacccctgggacgcgcgccacctcgctgcggtgcgcggctggcaagtgaggagtaaagtcggcgccgcctgggacgggggagtggagcttcctgccccgggcagcggccaggcggccccgcggttgattatggaagattcccacaagagtaacacgacagagactgcatctcagcctggttcaaccgttgcggggcctcacgtttctcagatagtacatcaggtgtcatcgttatcagaaagtgaggagtctcaggactcatctgacagcataggctcctcacagaaagctcacgggatcctggcccggcgcccatcctacaggaaaattttgaaagacctctcttctgaagatacacggggcagaaaaggggaaggagaaaatcccagcatttctgccatcacgtctatgtctgttccagcccccatctatcagacgagcagcggacagtacattgccattgccccaaacggagccttacagttggccagtccaagcacggatggagtgcaggcactgcagacattaaccatgacaaattcaagcagtactcagcaggggacgatcctccagtatgcacagacctctgacggacagcagatactcgtcccgagcaaccaggtggttgtacagactgcatcaggagatatgcagacctaccagatccgtaccacgccgtctgccacgtctctcccgcagaccgtggtgatgacttctcctgtgactcttgcatctcagacaacaaagacagatgaccctcaactaagaagagaaatacgactgatgaaaaacagagaagctgcccgagagtgccgccggaagaagaaggagtacgtgaagtgcctggagaaccgtgttgctgttctggaaaatcaaaataaaactctaatagaggagctaaagactttgaaggacctttattctcataaaagtgtttgattctttaaagagaaagtattttttgtggactttaaagcttaaaaattaggtggatttctttttagtggagttctataaattcaaaggtcaaagaagctactttgtattaggttttcacaaacagacatgatggagggagaatggagatgacctgcaggaagctactgtctcaattggaagctccgaaaagatagagtgctcaaggaatggactttcagcagtttaaatagaaataatggtcagcaacgaaaatggcaggcgacgttagtgaagcagtccgttcctgctacgtctgtatttctctgttccctaaaacttgcctttgtgtgtgtgcgcgcgtgtgtgtgtgtgtgtgtgtgtgtgtgtgtgtgtgtgtgtgtgtgtgtgtgtgtgtgtgcgtgcgtgcctcatttctgccaataaatttacaaatgtaaaagcataaagcgttactaagtatgtaaattatgtggtctgattgtgtcgtaatgtcaggtatgttaaatgagtttttagcagttagtttggttggactcgattggtttggagatctcctaaatggcgtggagacacatcagcctgtggtggaggtggtttgtgactttgctttgtcagaatggaaagagaactgtctgcaagtttgacagtttaatagtttgttttttgcttcctctgataagggcaagtacataatagattggttttgttttttttgttttttgattctctaatcctgtgtgcagttgaagatcattctcttgcgctttaacagaatgaagtgtttacaaaggccctcaaatgttttaaataacctgaatatgcacaccaaagctttcctgaggggttttataatcatcttaccgtaaggtttgtcaggttctaaaacagttactgaggcaatcttacattgagactattgtgtaatgtagcccatggtacctttataaaagaagtgactgccgatatatttttatagtgaatctttataaattctaatgttgagtttttaatgattattttaaatgtttatatagtttgtttagcaaaaaaaattttgtatctcaaagtatcatttttatattatgagaagagtaaaattttcaaattggctgataattgaattgtatgttttatataaagttttatctaaagtttcagctgtggtcagtacaccagcatttaacctctgtattctaatctgtgttcacttggaaactgcagaactgttgtgtacctacagagtatgtttcatattgtctgtgaaattaaaaaacatttgataagattaa

SEQ ID NO: 272 - DNA, 1679 bp, Mus musculus
atggcttccaaagccaacatggttcgtcagcggttcagccggctgagtcagaggatgtccgccttccagatcaacctcaacccgctcaaggagccgctcggcttcatcaagatcctcgagtggtttgcctccatctttgcttttgccacctgtggtgggtttaagggcaaaacagaaattcaagtgaactgtcctaaagttggtgtcaataagaaccagactgtgacagctacttttggttatccattcaggttgaatcaggcatcatttcatacacctccaaatgtcaatgtgtgtgacgtgaactgggaaaagcatgtcctcataggtgattactcctcttctgcacagttctacgttacgtttgcagtctttgtgttcctgtactgcattgctgcccttctgctctatgttggttacacgaacctctaccgggatagtcgcaaactgcccatgatcgactttattgttactcttgttgctacttttttgtggttggtgagttcctcagcctgggctaaagctcttacagatattaaagtagctactggacacagaattgtggaggaacttgaaatttgtaatccagaatcaggagtgtcatgttactttgtctctgtgactagtatgggctccctgaatgtatccgtgatctttggctttctgaatatgatactttggggaggaaatgcttggtttgtgtacaaggagaccagcttacacagtccgtcaaatacgtcagcttcccacagccaaggcggtggcccacccacttctggaatgtaactaaggggagaaatacactgtatgaaatgtgtgctctagcatgccttgttgccaacaccttgaaaagcattattgtttctaataaaaagtaatggctttttcagtaaattggtgggtttaaaaatttgctgcttttctacataaaatgtgccttttctagaaatttaagatgtaaatgtatttttacatgaaagtttgaaaattcgggagcctgttatgagatgatgttacttttaactgaacaataatttaactaagttgcttctaaagtgtttacaccttaaactttaacataaaccttcattcagaaaacagttatgtcgtatcataatataggaagaatgtgtttggaaaatacactactgttagtttgtatacatcagatctttcaggcttggcttgtttaaagaaaaccttgattgcataaatcatatttagaaaaaaattagtgcaattttatatttgaatattgttcatgttaaaatttttttgaattgcaaagactgggtatatattttgtttctgttttttctaaatgatctgctgtacttattaggtgtactaaaattgtcttagaagcgagggtttgaaaattgtacaaatgtgtagaggtaactttgcacttgtgctgcatgggtatatccattatttctggtggtttcttaggcttgcaaagagcacggttcccaagacgggtttatacatgtaggcgttctccatcaggcttgtttactatcttttgttcataccaagagaaaaaaatctactttttttttccagaccctgtttagaaggttactaaaaattaaggttgccttttacgtttgaaatgtttaacatttagtcaatgatgtttcttctcctgagtttaacattgatattgtgaaaataaa

SEQ ID NO: 273 - DNA, 1904 bp, Mus musculus
ttacagctagacctgtgtgcaaccaggagcgaagaccctcagtgtccccctccttacccaggttcctcacagaatggattcccagcgggagcttgcagaggaactccggctttaccaatccacccttcttcaggatggtctaaaagatctcctggaagagaaaaagttcatcgattgcaccctaaaagcaggtgacaaaagttttccttgccacagactgatactatcggcttgtagcccttacttccgtgagtattttttatctgaaattgaggaggagaaaaaaaaggaggtagccctagacaacgtggatcctgctatacttgatttaatcatcaaatatctgtactctgccagtatcgatctcaatgatgggaatgtgcaagacatcttcgccctgtccagccgcttccagattccgtcggtgttcaccgtctgtgtgtcttaccttcagaaaagactggctcccggtaactgtctggccatcctaagattggggctgcttctcgactgcccgagacttgccatttctgcccgggagtttgtgtctgatcgctttgtgcagatttgtaaggaagaagatttcatgcaactgtccccacaagaactgatctccgtcatttcaaacgacagcctcaacgtagaaaaggaggaagtagtatttgaggccgtgatgaaatgggtgcggacagacaaagaaaacagggcaaaaaatcttagtgaggtgtttgactgtattcgttttcgccttatggcagagaaatatttcaaagatcatgtcgagaaagatgacataattaaaagcaacccagaagtccagaaaaaaatcaaagttctaaaagacgcttttgcaggcaaacttccggaacccagcaaaaatgcagagaaggcaggggcgggcgaggtgaacggcgatgttggtgatgaagacttacttcccggttacctgaacgatatccccaggcatggaatgtttgttaaagatctcatcctcttggtcaatgacacggctgcagtagcgtatgaccccatggaaaatgagtgctaccttactgccctggcagagcagatccccagaaaccattccagtcttgttacccaacagaatcaggtctacgtggtcgggggactgtatgtggacgaagaaaataaggatcaacccctgcaatcgtactttttccagcttgataacgtaacatctgagtgggtcggacttccgcctctcccatcagccaggtgtctctttggcctgggagaagtagatgacaaaatctatgtggtggccggcaaagaccttcaaacagaggcctcactggattccgtgctatgctacgatcctgtggctgcaaagtggagtgaagtgaaaaatcttcctattaaagtttatggccataatgtgatttcacacaatgggatgatatactgtctaggcggaaagacagatgacaaaaagtgtacaaatagggtatttatctacaaccccaagaaaggagactggaaagatctggctccgatgaaaacccctcgttccatgtttggcgtggcaatccataaaggcaagattgtgatcgcaggaggtgtcactgaagatggtctttcagcttcagttgaagcctttgacctcaaaaccaataagtgggaagtgatgacggaatttccccaagaaagaagttctatcagcctggtgagcctggcgggagccctgtacgccatcggtggctttgcgatgatccagctggaatctaaagagtttgcacccactgaagtcaatgacatatggaagtatgaagatgataaaaaagaatgggctgggatgctgaaggaaatccgttacgcttcgggagctagttgcctagcaacgcgcttaaatctgtttaaactgtctaaactataaaggaggtgac

SEQ ID NO: 274 - DNA, 4088 bp, Mus musculus
gagcagcccgcgaagcagtaggctggagcgttctccgtggggacgcggaccggctgcccagcccttcatgtcgctgagggcgactgcgcgaggtcaggtttttttcatcattgagaacctcgcctgaagcaggtccactatgccgttagtaaccaggaacatcgagccaaggcacctgtgccgtcagacgttgcctagcgatacaagcgagctggaatgcaggaccaacatcaccctggcaaatgtcatccgacagctgggcagcctgagtaagtatgcagaggacattttcggagagatttgtactcaggcaagtgcctttgcctcccgagtaaactcccttgctgagcgggttgaccgagtacaagttaaagtcactcagctggatcccaaggaagaagaagtgtcactacaaggaatcaacactcggaaggccttcagaagttctaccacccaagaccagaagctctttgacaggaactctctcccggtgcccgtcttagagacctataacagctgtgacgctcctccccctcttaacaatctcagtccttacagggacgatggaaaagaggcactcaaattctacaccaacccctcatacttctttgatctttggaaggagaagatgctgcaggacaccaaggatatcatgaaagagaagagaaagcataggaaagaaaagaaagataatccaaatagagggaatgtgaacccacgtaaaatcaagacacgcaaggaagagtgggagaagatgaaaatgggacaagaatttgtagagtccaaggagaggctggggccttctgggtattcgtccaccttggtgtaccagaatggcagcattggctctgttgaaaatgtggatgcggccagctacccaccaccaccacagtcggactctgcctcctcaccttccccttcattctctgaagacaacttgcctcccccgccagcagaattcagctaccctgcagacaaccaaagaggatctgtcttggctggacccaaaagaaccagcatggtcagcccaagccatccacccccagctcctcctctgagctctccgccaggtcccaagcctggcttcgctcctccacctgcccctccacctccacctcccatgagtgtgccacctccactaccatcgatgggattcgggtctcctgggacccctccacccccatcacctccatctttccctcctcaccctgattttgctgctcctccaccacctcccccaccaccagcagctgactacccaatgccaccacctcctttgtcccaaccgtctggaggtgctcctccgcctcctcctccccctccccctccagggcccccgcctctccccttcagcggtgctgatggccagcctgctgcaccaccaccaccaccaccttctgaggccaccaagcccaagtcttcattgcctgctgtgagtgacgcgcgcagtgacctgctttctgccattcgccaaggctttcagctgcgaagggttgaagagcaacgggagcaagagaagcgtgatgtggtgggcaatgatgtggccaccatcctgtcccgtcggatcgctgttgagtacagcgactcggaagatgattcttctgaatttgatgaagacgactggtcggattaactccgcctgctgcccacattcctctttctagtcctcccacctgccttcctccatacaaactaacagtctcatggggggaagaaagcaagggacaaagaactgcaaggggccaaagccaaagatctatccgagtgcttccttcaactgaccatatgcttcttcctcgtgtctgcctgcgggctcctgagggtccacagctgagctgatccatctttccctcaagtgaccgtatctagtgacaggaagggagaaccctacagtagatccctctgcttgggtttcaactggagatagtgccttcccctgataaccattttaacccatggccttcgtcaaaaccctttcatttagctacttcaaataatgttatccacctcctgtctcacagcagtgggtacagcctgtgtgggcgcaggtggtcccttttctgtgccctgacaagtagactggcacactcctgccccacactcagccttctgcagcaggtaggcttgcttctgttagctctgcctggatgcctttgttccagaaggcatcaggcctctaaagactgtctcacaagtgatgcccttctggagactgagggtgtggccttcctcccatgctctctctgggtgagtgtggggtctgggtgtcctttgcattcccctcctcaccccaggtgccttaagacagcccagttctaacctgatattcatgaccaaactagccctgacactcagggacctgggcctctgctgactgtcaggagcaaaacttgaaggtgtggcaccgcaggactggaagagagtggaacaccttgggtcctgcctgttcagggtactgaggccaagatgagaagtgactctctcaaggtcacacagataggtgatagaacaagagcccagggttcctgtttccaagtcacctgtgtttcctgggaccaaataatgagcacctgctggagtctgggcagagcagcctggctcccttctaccccagagctcccaaatgccggccttgcatttggagggttcatggcctgtgcggggaggtgggggggggggctctccggtgcagctttaactgcagccgctctggtaagccgctcttatttccccttctgtctgcagccagtcatgtggcatgggagctgtgctggggaggcagtgtagagaggagctgtggggcagccagccttggcaggtgcagtttgcagttcactgcagctccctcccccttttgtttcctcaatttaagcagaggttgtgccagctgtagaaacttcagtccctcaggctggcagccgctgcaggtacctgcctgggggggcctggcaggccatggagaaggctgagaggcagaaggacacgggtcttcctgcctcaccaccttgctgtgcatgatgatgctgacccaccccctttacctcccttcccagaactgatacacgggtgttattattcaggaaaaaaactgagcagctctggccagcagcaaggtttcttctctactgccccaactattgtgtggcctcttgtgctgaaatctctggcttcagagcctgaaacaaagagaaacaggatctgtctctacccagcacagcaaatggttgtagtattgccaaagccctcataaacccctccggcttgaggagagtgcaatcatggctctgctgcctgcacttgctgggttcctcccctctgcctcctttcttgaactcagaggtagggactaagcaccaggtgccagcaggccctcctgctgtggccactccagagtgctccgtgtctccatgtgtccgtggcctgccccccccccaaccccccaaatccagtgtctggcaccgggtttggcagtcaactccatgctgtgcatgtttcccaccccgtgccttagaagctgaaggtgctttttcatcagaaccttaacatggctgttgatggtaccctggctgcagcccagcgggggctggagaggcaggggagggcagtggtccttccaaatagaagtcctggggcctggccaggccagggtttgggcctaatggtttttactaaattactcccctcctgctctccgagaaaggggagccagagccgctcactgtggttctgttccgaccttgaaggggcggtattggcctggcttctggaatggacagagtccaccaggaaagactgggggcgggaggagctggggaggggccctgtctgcggaaggtaggattagatcattagctcagtgacctcctagggtttcgatgtgctgtgttctcatcctacagctggtttggtaatgatctgcaagtcccggagagcaacagcacagctccgcctgacgctctcattaaaatccatgcagccaagctctgcgctttgtagcagccggccttgcagagcctcctcagcttggggggctggggacccagtcagctgagaggtcctctaggctctacttaggcatatgtgtaccc

SEQ ID NO: 275 - DNA, 1051 bp, Mus musculus
aaaactctgacgccgctcctgtgttcctgagccagtgttcgggctgtcccggggcggctggcggactcggttaggggccggaccccgcgatctgtccgggtcaccgccctcccggcctgccctctttccggtccacactagggacgcctgaggccgtggggtccctgagctgggccggggagctcggggctcatcccctcctcccgaggctcggatgggaggtggcgggaggagagacctgggatgttcagtctgatggccaactgctgcaacttgttcaagcggtggcgggagcctgtcagaaaggtgacacttgtgatggtcggccttgataatgctggtaaaacagccacagcaaagggaatccaaggagagcatcctgaagacgtagctcccactgttggcttttctaaaattgatctgagacaaggaaagttccaagttaccatctttgacttaggaggtggaaaaagaattcggggaatttggaagaattattatgctgaatcctatggggtaatatttgttgtggattccagtgatgaggagagaatggaagaaacaaaggagacaatgtccgaagtgctaagacacccgaggatatcaggaaagcctatattggtgctggccaacaagcaagacaaggagggggctttaggcgaagcggatgtgattgagtgtctctcgctggagaagctggtcaacgagcacaagtgcctgtgtcagatcgaaccttgttcagcagtcttgggatatggaaagaaaattgacaagtccattaaaaaggggctttattggctactgcatatcattgcaaaggactttgatgccttaagtgaacgcatccagaaagacacaactgaacagcgagctcttgaggaacaagagaaacgtgagagggctgaacgagtccggaagttaagggaagaaagagaacgagagcagacggaacttgatgggaccagtggtctggctgagattgactcaggaccagttcttgcgaatcctttccaacccattgcagctgtaatcattgagaatgaaaagaagc

SEQ ID NO: 276 - DNA, 3548 bp, Mus musculus
cggggcggcgcggaggccgcggggagcgcagggggcgcggcgggcggcgacatgacggacagcatcccgctgcagcccgtgcgccacaagaagcgggtggacagtaggccgcgcgcggggtgctgtgagtggctgagatgttgcggtggaggggagcccaggccccgtactgtctggttgggacaccccgagaagagggaccagcggtaccctcgaaatgtcatcaacaaccagaagtacaatttcttcacatttcttcctggggtgttgttcagccagttcagatacttcttcaacttctacttcctgcttctcgcctgctcgcagttcgtcccagagatgaggcttggcgccctgtacacctactgggttcctctgggcttcgtgctggctgtcaccatcatccgtgaggcagtagaggagatccgatgttatgtgcgtgacaaggagatgaactcccaggtctacagccggctcacgtcacgagggaccgtgaaggtgaagagttcaaacatccaggtgggagacctcatccttgtggaaaagaaccagcgggtccctgctgacatgatcttcctgaggacgtcagagaaaaacggctcttgcttcttgcgcacggatcagctggatggagagacagactggaagcttcggctcccggtggcctgcacacagaggcttcccacggctgctgacctcctgcagattcggtcctatgtgtacgctgaagagcccaacatcgacattcacaacttcctggggactttcaccagggaagacagtgaccctccgatcagtgagagtctgagcattgagaacacgctgtgggccggcaccgtcatagcatcaggcactgttgtaggcgttgttctctacactggcagagaactgcggagtgtcatgaatacttccgaccccagaagtaagattggcctgttcgacctggaggtgaactgcctcaccaagatcctgtttggtgcgctggtggtggtgtcgctggtcatggtggccctgcagcactttgccggccgctggtacctgcagatcatccgcttcctgctcctgttttccaacatcattcctatcagcttgcgtgtgaacttggacatgggcaagatcgtgtacagctgggtgatccgcagggattccaaaatccccgggaccgtggttcgttccagcacaattcctgagcagctgggcaggatttcgtacttgctcacagacaagacaggaaccctgacccagaatgagatggtgttcaagcggctgcacctgggtacggtggcctacggcctggactccatggacgaagtgcagagtcacatcttcagcatttacacccagcaatcccaggatccacctgctcagaagggccccacggtcaccaccaaggtccggaggaccatgagcagccgtgtccacgaggctgtgaaggccattgcactctgccacaacgtgacacccgtgtacgagtccaatggtgtgacggaccaggctgaggctgagaagcagtttgaggactcctgccgagtgtaccaggcatccagcccggatgaggtggctctggtccagtggacagaaagtgtgggactgacgctggtgggtcgagaccagtcctccatgcagctgaggacccctggtgaccaggtcctgaatctcaccatccttcaggtcttcccgttcacctatgagagcaagcggatgggcatcatcgtgcgggatgagtccacgggggaaatcacgttctacatgaagggagcagacgtcgtcatggctggcattgtccagtacaacgactggctggaggaggagtgtggcaacatggcccgggagggactacgtgtgctggtggtagccaagaagtccctcacagaggagcagtaccaagactttgaagcccgctacgtccaggctaagctgagtgtgcatgaccgctcgctgaaggtggccacggtgatcgagagcctggagatggagatggagctgctgtgcctgactggtgtggaggaccagctgcaggcagatgtcaggcccacgctggagacgctgcgcaacgctggcatcaaggtttggatgctaacaggggacaagctggagacagccacgtgcacagccaagaacgcacatctggtgaccagaaaccaagatatccatgttttccgactggtgaccaaccgcggggaggcccacctggagctgaatgccttccgtaggaagcatgactgtgccctggtcatctctggagactccctggaggtttgcctcaaatactatgagtacgagttcatggaactggcctgccagtgcccggctgtggtgtgctgccgctgtgccccaacccagaaggcccagattgttcggctgctccaggaacgcaccgggaagctcacctgtgcagtaggggacggaggcaatgacgtcagcatgatccaggaatccgactgcggcgtgggcgtggagggcaaggaagggaagcaggcctcgctggcagcggacttctccatcacccagttcaagcatctcggccgcttgctcatggtgcacggtcggaacagctacaagcgctcggcggccctcagtcagtttgtgatccacaggagcctctgcatcagcaccatgcaggctgtcttctcgtctgtgttctactttgcatccgttcctctctaccaaggcttcctgatcattgggtattctaccatctacacgatgtttcccgtgttctccctggttttggacaaagacgtgaagtcggaagtcgccatgttgtatcctgagctctacaaggacctgcttaaggggcggccactgtcctacaagacgttcttaatttgggtgttaatcagcatctatcaagggagcaccatcatgtacggggcgctgctgctgttcgagtcggagtttgtacacatcgtggcaatctccttcacatccctcatcctcactgagctactgatggtggcgctcaccatccagacgtggcactggctcatgacagtggccgagctactcagcctggcctgctacattgcctccctggtgttcctccatgagttcatcgatgtctacttcattgccaccctgtcattcctctggaaggtgtccgtcatcaccttggtcagctgtctccccctctatgtcctcaagtacctgcggagacggttctccccacccagctactcgaagctcacttcctaagctgcagggctgcctcgggcagggcctccggcctccggcgctctcccaggaggaggtcaagttccacacgcacgagccgcctctgctggacggtgcagtcatggctggcacatgaggcttcgctgaggcgacactgggcacctaatggggatggaacattggtggaaccggagggagggacctgagagctgtacctatcagaaccttgggtgctaagctgtgctgagggggaagacgtgggaccggatggcccgtctgaggtttgtggggtcactgtgcaagcttccttatggtttgaacctcttgtcatgtgataaaagtctctgtctcgaaaaaaaaaaaaaaaaaaaaaa

SEQ ID NO: 277 - DNA, 3160 bp, Mus musculus; identical to SEQ ID NO: 134

SEQ ID NO: 278 - DNA, 3160 bp, Mus musculus; identical to SEQ ID NO: 134

SEQ ID NO: 279 - DNA, 1984 bp, Mus musculus
tactccactttatcatgctgtcattttccttaatcccttgggctttggcagagtccagtggtatttattggctccctctaagtaggcttcagagagatgggggaaggacagaaatccaatcctttagcctacttgcgagccctcctttctggtctgagcctagagggccacgccagaatggtagcacgccccttcccgcaggacgccccgacaggcccaacaatagagcacgaatacgtcacgtgggcctcgcacgcccgacagcccaacaatagagcacgaatacgtcacgtgggcctcgcagtgacaaagacaacgtggcgaaagacagcgccaaaaatctccgtgcccgctgtctgccaccaactccgtcttgtttcacccttctcccttgcggagctcgtctgggagacggtgaattaccgagttaccctcaattcctacagcccccgacagcgagcccagccacgcgcaccgcggtcaaacagcgccggagagagttgaacttttgattgggcgtctgtatgtggcagaaggcggagggagagattccgagccgacgtcccgcgagagccgccgggcccagagcgcaggccgacaggagttggcaagggccgggccgagggcgggccagaagacgcgtcctttggctgtggacaccgtcgtagagtcgtctgggttgaaccgctgggccgaaagcttttgtcaggggcctgggcgagaacgaggcccgcgaggttccggatggtgtccatgactttcaaacggagccgcagtgaccggttctacagcacccggtgctgcggctgtttccatgtccgcaccgggacgatcatcctggggacctggtacatggtggtcaacctgttgatggccattttgctgaccgtggaggtgactcatccaaattccatgccagctgtcaacattcagtatgaagtcattggtaattactattcatctgagagaatggctgataatgcctgcgttctttttgccgtctctgttcttatgtttataatcagttcaatgctggtttatggagccatttcttatcaagtgggctggctgattcctttcttctgctaccgactctttgacttcgttctcagttgtctggtggccatcagttctctcacttacttgccaagaatcaaagaatatctggatcagttgcctgatttcccatacaaagatgacctcctggcattggactccagctgcctcctgttcatcgtccttgtgttctttgtggtattcatcatttttaaggcttacctaatcaattgtgtttggaactgctacaaatacatcaacaacagaaatgtgccagagattgccgtgtaccctgcctttgaaacacctccacagtatgttttgccaacctatgaaatggctgtgaagattcctgagaaagagccaccacctccttacctgcctgcctgaggacattctgccttgtcaataaagcctataccagcttctcgtcttgtttattttacaagaaagctgcagtgcgggcctctcagacttgtttgatagaaagtacactgtcttgtctgagcatttattttcaaacactaaggagcttttggacatttattaaaaactttttgttaagtatcacattttagagactttttgaagacaatctagattaagcaagagccaagtgccattgttagcctttagctgagggtatgggggggaggggtctccatgttttcttttttaactttgcactttctttgtataataatagtttatgttttggatgtttggtgccctgagtagtttccggggcgtgactacagtgttgaggatgaataggttgggtataacacctgcagtttccagctcgatgaaacaggagagagagagaaataccagtttgacttgactgtggaagatgatggttgcatgcttctcaattgtacgtttccatcttggtgataaacccccttaataaagctcataaatttta

SEQ ID NO: 280 - DNA, 2507 bp, Mus musculus
atataaaaagatctctctgtctggatttcctcttttccaatctccttgccagataagaggggttaggttgtcttgagttggaacccacatttctttcttgattcaggataaccagctaacagatattcactactgtcgtcctgaaattaactgaggatattcattaatttcctggaagctagatttttgaaaagtcttgattttgcctgtctcttgaggcaaaacttagcaactttggggattgataaatcttctgtcttcctggtcctctccctgctttttctcaactccactgcaagcaagagtggacatactcttagggtggcttttgtggcaggcatggatcctagctgaactctttctccagtgtacaacattgctgcatctcactgaggcctgacagttctccttttgacacctcattacacatagcagagaaaggcataaatcctaaagatgtcttccagtaatgaccacgtgttagtaccaatgtcgcagagaaacaacaacggccttcctaggatgaactccagagccgttaggacgctcgcagaaggagatgtgttgagttttcatcacatcacctatcgagtgaaagtaaagagtgggtttctagtccggaaaacagttgagaaagaaatactatcagatatcaatgggatcatgaaacctggccttaatgctattctgggacccacaggcggaggcaagtcttcgttgctagatgtcttagcagcaaggaaagatccaaagggattatctggagatgttttgataaatggagcacctcaacctgcccatttcaaatgctgttcaggttatgtggttcaagatgacgttgtgatgggcaccctgacagtgagagaaaacttacagttctcagcagctcttcgacttccaacaactatgaagaatcatgaaaaaaatgaacggattaacacaatcattaaagagttaggtctggaaaaagtagcagattctaaggtcggaactcagtttatccgtggcatctctggaggagaaagaaaaaggacaagcatagggatggagctgatcactgacccttccatcctcttcctggatgagcccacgactggtttggactcaagcacagcgaatgctgtccttttgctcctgaaaaggatgtctaaacagggtcgaacaatcatcttctccattcatcagcctcggtattccatctttaagttgtttgacagcctcaccttactggcttccgggaaactcgtgttccatgggccagcacagaaggccttggagtactttgcatcagcaggttaccactgtgagccctacaacaaccctgcggattttttccttgatgtcatcaatggagattcttctgctgtgatgttaaatagagaggaacaagacaatgaagcaaacaagactgaagagccttccaagggagagaagccagtaatagaaaatttatctgagttttatatcaactctgccatctatggagaaacaaaagctgaattagatcaacttccaggagctcaggaaaagaaaggaacatcggccttcaaagagccagtctatgttacctctttctgtcaccagctccgatggattgccaggcgctcatttaaaaacttgctcgggaaccctcaagcttctgttgctcagttaattgttacagtcatactggggcttattattggtgccatttactttgatctgaaatatgatgccgctggaatgcaaaatagagctggagttttgtttttcctgactaccaaccagtgtttttccagtgtgtcagctgtggagctgttcgtagtggagaagaaactcttcatacatgagtacatcagtggatattacagagtgtcttcttacttctttggaaaggtgatgtctgatttactccccatgaggttcttgccaagtgttatattcacttgtatattatacttcatgttaggactgaagaagacggtggatgcttttttcatcatgatgtttacccttataatggtggcttatacggccagttccatggcactggccatagccacaggccaaagtgtggtgtctgtagcaacacttctcatgacaatcgcttttgtatttatgatgctcttttctggcctcttggtgaatctcagaaccattgggccttggctgtcctggcttcagtactttagcattcctcgatatggcttcacagctttgcagtataatgaattcttgggacaagagttttgtccaggattcaatgtaacggacaacagcacttgtgttaacagctatgcaatatgtactggtaacgagtacttgataaatcagggcatcgaactgtcaccttggggactgtggaagaatcatgtggccctggcttgtatgattattatcttcctcacaattgcctacctgaaattgttgtttcttaaaaagtattcttaatttcccctttaacggactattaattgtactccaattaaatatgggcactttgattaccataaaaaaaaaaaaaaaaa

SEQ ID NO: 281 - DNA, 5646 bp, Mus musculus
gcggtccagccctcaggttccagtaaagcccctgcggtcctgccgccttgcggtgctcctcgctggctctccaccctcactcgacttctgcggcgatatagcacctcaagacatggctgcccagtgtgtcacgaaggtggaactaaatgtttcctgtaacaaccttttggatgcagatgtaacatcaaagtcggaccctttatgtgtgctgtttttgaatacgagtggtcaccagtggtatgaggttgaacggacagaaaggattaagaattctttgaatcccaaattttctaagacatttgttattgattactactttgaagtggttcagaaattgaagtttggaatctatgacattgacaacaaaactatcgagctgagtgatgatgacttcttgggagaatgtgaagtcactcttggacaaattgtttccagtaagaagctaactcgaccactggtgctcaaaaatggcaaacctgcagggaaagggagtattacgatttcagcagaagaaataaaggataacagagtggtattgtttgaaatggaagccagaaaactggataataaggatctgtttgggaagtcagatccatacttggagtttcacaagcagacatcagatggccactggctgatggttcaccgaacagaggttataaaaaacaacctgaatcccatgtggaagccttttaagatctctcttaactctctgtgctatggagatatggacaaaaccattaaggtagagtgttatgattatgacaatgatggatcgcatgatctcattggaacatttcaaaccaccatgacaaaactcaaagaagcctccagaagctcacctgttgaatatgaatgcataaatgaaaaaaagagacagaagaaaaaaagctacaagaactcaggtgttatcagtgtgaagcactgtgagattactgtagaatgcacatttcttgactacatcatgggagggtgccagctcaattttactgtgggagtggacttcaccggctccaatggtgaccccagttctccagactccctgcattacatcagcccgaatggtgttaatgagtatctgactgccatctggtctgtaggattggtaattcaagattatgatgctgataaaatgtttccagcttttggctttggagctcaggtgccccctcagtggcaggtatctcatgaatttccgatgaactttaacccatcgaacccctattgcaatggaatccaaggcattgtagaggcttatcggacctgtcttccccagataagactctatggaccaactaatttttctccaattataaatcacgtggccaggtttgcagctgcagccacacaacagcagacagcttctcaatactttgtgctcttaatcatcactgatggcgtgatcacagaccttgatgaaaccagacaggcaatcgtcaatgcagccaagctgcccatgtctatcatcattgtgggagttgggggagctgacttcagtgccatggagtttctagatggcgatggtggaagtctccgtgccccttcaggagaggtggccataagagatattgttcagtttgtgcctttcagacagttccagaatgctccaaaagaagcgcttgctcagtgtgtcttggcagagattccccagcaggtggtgggctacttcaacacatacaaactccttcctcccaaaaacccagctgtgaagtagaggagccaggacagctgcaggatttcaaaagctgtgtggagcaacgccatctctcacacagaatgatgtatctgccctctgcgcttcttaccccaggctatatgatgtaaacctagctttttgtatatatcctatctgtttaaagcatccattttatactttttgaagaggacagtagcaagtccatttctgctcagtgtattcagtgattgttagtgatttatagaaattacaagagtgctgtttggaattgaacttaatgtggggaaagtgatgtatgtttgtttattgtctactttctataatgaaatgccatttttaagtgttgcccgtggagtgaatggggatttacaggatgaagtggtatacaggttgctatactgtttatagtaaatattttgcaagtcaatcaaagtgaggtactgagtttgtacctgtgactctctattctgtctcttttatgctgcagtgctacagtgtactagctgtgttttcatatggttgcttatgaaaaccaatgggcttactccgttttgaaaatgtccactcaaccagtggacagctccttgtagacaagacatttttattgccttttgaaatgttttcactgtgaagtcttgtacatatatggcctttgctttactgagtaaacaagacactcaaacttctgtgggcatcaaatgataggtcatcccagaggccacatgattagaccagtgtaggttgactaagtgagtaggattgcttcgttcactaaagctttgaggaccaaacatttaaggtgaaaattcaaacagagttgcaggccagacatggtggcacatcatctgagcatttgggaggcagagacattagggccagcacaagccaacccacttacatagttaattccaggccagccagctacccaatgagaatgtgtttcagaataacaaagaaaaataagtaattgagaaatacattttttctaagtaatggtataattgcaaaagttcatttgtaatttttttcttgtcctgtgtattgatttatatgaatttatttagatatttttgccatttaaaaatagtattattgttttctttaagcttataattctagttatttattaaccaaaattccatttttcatttcaataatatactatttcctacatccagaattctgttaggcataaagcctgatataagattttaaaaaaagaaaagaaaaaaccgcatatacaaactctcttctagctgctacatttacatagagtgaacttagtattcttgttttgaagaattgaattattttaactttactctgtagaacatactgtctagtgagcacacatttatggaatagatttgtataatatttgcctaagggtctggatgtcaaatactttgcctatctgtgcagtggccagttatcgccaatgtaacagaattgtgtattcatcacatatccctaagtggttgtccacagtaccagccagcattcctgtccgtgttactgagtcctgccaccactgcctgagtctttgttttctgcaggcttctcagaaacagcttcctgctgaggttaggctcagagaagatccacctgtcttgtttgcctcgccccgtgagccgttgcctccttcccacatgggtaatttgcctctggatattgctgttaatctgaagcaatgcacctctataaggcagggtttcttaaaatttattttcatttatccaagaaatttttatgtaacccactgtaaccccagcttaaatacaaactaatatttatgataggtatacaaatcaatcattgcaagtaaattaaaagaaatttattttagacacctggagagatggctccaagttaacagttctcttgcagagaacctattgatttccagcacatacatcaggcagctctacttggctgtaactccagcttcaggggatctgatagtctccttcctctgccctccgtgaggacctgcttgtgtgtgtgtgtgtgtgtgtgtgtgtgtgtgtgtgtgtgtgtgtgtgtgagagagagagagagagagagagagagagagagtgcacatacacacacacacaaaacaaagtgaacaatttttgttagacttacagttttaccatttattaaaggtgaaagcatatttgcctactgctgaggtgaatatgcttgcttggttttatataagatctagatcgcaactgactatttgatattgaagtacacagaacatctttaatgtacttcagagttggttgatatcttgatttttgattgccaatacttagaaccttttttcacataaacacatagtacaaaatgccatcagtgtttagaggtgtttccgaagttggaaatgctatcgtcatcctaagccaaaacacatttaaagtttgtttttttttttttatgaagcaaatgttgacaatttttgaaatcaaactttctagcataatacaatctagaaatctattgattggatattgacttgatttagaatgacaggaaaatagaagtctttctcttctgtaacctagtgtttatgctaaagctgagtatgcacagtaaaatcacattaaatcacaatgcataaagtaacactgctgagtcaggcagtgtttattgttgttgtgtgacatggcagcagtgtagtgcaaaatgcgcctgctgtctatgacaaccaaggctgcagtgaagttgagtgatacaacatggcaagccctgccagaaacacctcagattcattacacatttggttttgacttaatttttgaccattgttcattagaaagctgtactgttgttgatttttttccagtcagttacatggctgcctatgggaccatggcccacagtttaagaacatgggcatgactcagtagtaacaattcagttatcagtaaagtaatgaaatctgatttttttttcttttttttttctcatttgaaaccattattagtccacagtctcagtttcagttctctgtgcttgggaagatgtcacagtggcttttaggactttcttttgcatacagagggagccagcccagaaatgcattagattctctgtatgttaatggtaggagaggggctttttggctctgcagcaaggctcagtaggcttgctcagaactgcaggcccatctccatctccatgtggtagctgtcttatttctgccgtttggtcttccatggtttctttcatattgtggtttacctgcattttttctttttaaaacagtttttctttaaatgactcgtcttgatcaagttttataaatgccattcataggagctgtgattctggcaaattaaagtaattcatagttttctgcaatttgaaataaaagcatttccaacttctagattatcattttataaattctttgtttcagcactcaaccttcattccatactattttatagtgtgttgtactcaaatacttatttttccttttgtgccactatttgaacaaatgccattcattcttaaagaacattgacatatgtatgtggccatcctgtgcatagacatacaatttctcacatacagatattcagaaatagtatttgtactagtctagtcaccttattttctgtttaagattggtttgtttaagaccattaacattttaaatcttctgatgaatttacaagtattcactttagacagggctctgtcagctttcccagagtagacccagggcctcactgatcttctgctgctgtgttttatgtgtctggccttgccttttcatttcatactagaaagccatcttccagaatgctctctaggctattttttcatgaaggtgatgtaagataacagctgggtagaattgtgagcagtatgtgcataacttactaaatatgtaaatttatattaaatacattttccatgtgagttccctttaaataaagttactcttgatgtaa

SEQ ID NO: 282 - DNA, 2419 bp, Mus musculus
actttggcatggtctccaccacttcaagatggtggcagtgacatttctcactacgtggtagaaaagcgagaaaccagtcgacttgcatggactgtggttgcttcagaagttgtgactaattctctgaaagttaccaagctcttagaagggaataaatatattttccgaataatggctgtcaacaagtacggtgtcggggaacctttggaatctgctccagtactcatgaaaaatccatttgtgcttcctggaccaccaaagagcttagaagtcacaaacattgccaaagactccatgacagtctgctggaatcggccagacagtgatggtggcagtgagatcattggttacattgtggagaagagagacagaagtggcgttcggtggatcaagtgtaacaaacgccgcattacagatttgcgactcagggtgacaggattaacagaagaccatgagtatgaattcagagtctctgcagaaaatgctgctggagttggagaaccaagtcctgctaccgtttactataaggcatgtgatcctgtgttcaaacctggcccacccaccaatgcacacgttgtagacaccactaaaaattcaattacacttgcctggagcaaacctatctatgatggcggcagtgagatcctgggctacgttgtagaaatctgtaaagctgatgaagaagaatggcaaatagttactccacagactggcctgagagtcactcgatttgaaattgccaaactaatcgaacaccaagaatataaaatacgagtttgcgccctcaacaaagttggtttaggtgaggctgcctcagttcctggtacggtgaaaccggaagataaactcgaggcacctgaacttgaccttgactctgagttaaggaaagggatcgttgtcagagctggtggatctgccagaatccatattccattcaagggtcgtccaacgcctgagatcacttggtcaaaagaggaaggtgaattcacagataaggtccaaattgagaagggaattaacttcacccaactctcaatagataactgtgacagaaacgacgccgggaaatacatcctcaagttggagaacagcagcggatcaaagtcggctttcgtaaccgtgaaagtacttgacacaccaggaccgccacagaatctggctgtcaaggaagtgagaaaagactctgtccttctggtatgggagccacctatcattgacggtggggcaaaggtcaagaactatgtcatcgacaagcgcgagtccactcgaaaagcatatgctaacgtgagtagtaaatgcaataaaacgagcttcagagtcgagaacctgaccgaaggagccatctactactttagagtcatggcagagaatgaatttggggttggtgttcccacggagacatctgatgctgtgaatgcttctgagcctccttccccaccaggaaaggtcacactcactgacgtgtcccagaccagtgcatcccttatgtgggagaaacccgagcatgatggagggagcagaattctgggctatgttgttgaaatgcagcccaaaggaacagaaaagtggagagttgtggctgaatccaaagtctgtaatgcagtggttagtggcctgagctccgggcaagaatatcagttccgtgtcaaagcttacaatgagaaaggaaaaagtgacccgagagtgcttggcattcctgtcatagccaaggacttgaccatccagcctagttttaagctgccatttaatacatatagtgtccaagcgggagaggatctgaaaatagaaattccagtcataggcataccaagacctaaaatttcttgggtcaaagatggtgagcctcttaaacagaccaccagagtaaatgttgaagaaacggctacttcgactattttacacattaaagaaagcagcaaagatgacttcgggaaatacagtgtcacagcaacaaacagtgcaggcacagcaacagaaaacctcagtgttattgttttagaaaagcctggtcctcccgttggaccagtgaagtttgatgaagttagtgcagactttgtggtcatatcttgggaacctcccgcctatactggtgggtgccaaatcagcaactacattgtagagaagcgagatactaccactaccaactggcagatggtgtcagcaacagttgccaggacaaccattaaaataagcaaactgaaaacaggcaccgaataccagtttaggatttttgctgagaacaggtatgggaaaagcactcccctggattctaagcccgttgttgtacaatatccatttaaagagcctggaccacctggaaccccttttgtaacatctatctccaaagatcaaatgcttgtgcagtggcatgagccagttaatgatggaggcagcaaagtgactggctaccatcttgacc

SEQ ID NO: 283 - DNA, 2378 bp, Mus musculus
gagtgcgcggcgccccttgcttcctcggcgtctcggagcgagcgcgtgagcggtggactgcggccgagccatggcgcttcacgtccccaaggccccgggctttgcccagatgctcaaggatggagccaaacatttctcgggattagaagaggctgtgtatagaaatatacaggcctgcaaggagcttgctcagactactcgcacagcgtacggaccaaatggaatgaataaaatggtcatcaatcgcctggagaagttgtttgtgacaaacgatgcagcgactattttaagagagctagaagtgcagcatcctgctgcaaagatgatagtgatggcctctcatatgcaagaacaagaggttggtgatggcacaaacttcgttctggtgttcgctggggctcttctggaactagctgaagaacttctgaggattggcctgtcagtatcagaggtaatatcggggtatgaaatagcttgcaaaaaagctcatgagatccttcctgagttggtatgttgttctgccaaaaaccttcgagatgttgataaagtgtcctctctgcttcgaacctccatcatgagtaagcagtacggcagcgagacgtttttggccaagcttattgctcaggcttgtgtttctatctttcctgattctggcaatttcaatgttgataacatcagagtatgtaagattctgggctctggtatttattcatcctcagtattacatggcatggtttttaagaaggaaactgaaggtgatgtgacatctgtcaaagatgcaaagatagctgtgtactcttgtccgtttgatggcatgataacagagacaaaggggaccgtgctgattaagactgccgaggagctaatgaacttcagtaagggagaggagaacctcatggatgctcaggtgaaggccattgcaggcactggtgcaaatgtcatagtaacaggcggcaaagtggcggacatagctcttcattatgctaacaagtacaatatcatgttggtgagactgaactcaaagtgggatctcagacgactctgtaaaacagttggtgccacagctcttccaaaattgactcctcccgtccaagaagaaatgggacattgtgacagtgtttacctctcagaagttggagatacacaagtggttgtttttaagcatgaaaaagaagatggtgccatttctactatagttcttcgaggttctacagacaatctgatggatgacatagaaagggcagtagatgatggagttaatactttcaaagttctcacaagggataagcgtcttgtacctggaggtggagctaccgaaattgaattggctaaacaaatcacatcatatggagagacgtgtcctgggcttgaacagtatgctattaagaagtttgctgaagcgtttgaagcgattccacgggcactggcagaaaattctggcgtgaaggccaatgaagttatctctaaactttattccgtacaccaagaaggaaacaaaaatgtggggttggatatcgaggctgaagtccctgctgtaaaggatatgttagaagccagtattttagatacttacttgggaaaatactgggctattaaactggccactaatgctgcagtcactgtactaagagtggatcagatcatcatggcaaaaccagctggtgggcccaaacctccaagtgggaagaaggactgggatgacgaccagaatgactgaggaacttgtcataggttaagagttgtgtttgtagagtagaacttgcccagtgttttatttttcttatttgtgtttgtactctgctgggtggtacaataaatgtgttactgttatggccgtctgtttaatcactcacatgactgttctcattgtatacttgaccatatctattgggaaagacactttctagtctgttgtttatctcatttccaaagttgttcccccaatcccatggccttgaaagtctggcttctaaatgtttgttgtttatcccatagcaaacaaaaaaagttcagacagtgtcctaattaatataaggcttttcaatagtggctgggccagagtttatgcgcacacactgacaccaagatttcacattgctcccaatcctaatctcagcactagaatagtgaaacatggtgttgccagtagtgggtacagtaaataacaacttaaactctaataaaacaagttttgggaatatcagtttattgatgtgtcaagcactaccacccagtcagagtaagcacagaacttagttattcaaatccttcctaaagttgaaactagaaggaataaaaaccagtatgctaatacaaaaccgctgtaaattattttgcctgtatttaaataaataaacatgattttttttctgtcattt

SEQ ID NO: 284 - DNA, 1844 bp, Mus musculus
gccgctgctgcgcctctgctcctgccgtccccgctgcagtgcgaagggctcgaagatggccggttggcagagctacgtggataacctgatgtgcgatggctgctgccaggaggccgccattgtcggctactgcgacgccaaatacgtctgggcagccacggccgggggcgtcttccagagcatcacgccagtagaaatagatatgattgtaggaaaagaccgggaaggtttctttaccaacggtttgactcttggagcaaagaagtgttctgtgatcagagatagcctatacgttgatggtgactgcacaatggacatccggacaaagagtcaaggtggggagccaacatacaacgttgctgttggcagggccgggagagtcttggtctttgtaatgggaaaagaaggggtccatggaggcggattgaataagaaggcatactcaatggcaaaatacttgagagactctgggttctagctgctaggcagactgttaagtattaggggaaaattgctcttaaattttcctagctgtaagcttaagtctcctttgtatccctctgttggtggggaaaggtgtctttctttctgccccttccccttaaataattgtgttcatttttgttttgtttccttgtgtactccagcattggttatagtcatgggaaaggaaggtgtccacgcaggcacaattaacaagaaaacatatgaactcgctttatacctgaagaggtctgtaaccaacctttatctggcatcataattgcagcacaataatgatttgcatgatatcttgaaactggggaagggggcatgccaagttgggcatcacttcgtcttagcagttagtggattactgattactaaaataggttaatagtaagcaaggtgccggtgtacagtctctaactcgatcagtgtcttttcagcactttggagcatttccttggctcatctagtcttccttttgtagcgcatggttgggaggaaaaagtgcatgcctctgtacgtcacacctttctcacccctccctaccaacacgaggtgtttggtctgcttccattctcttctgtgtagtgcctggtttatttaactaattaatacctcctctgttgatgagctattgagagttgcagtgttttactttttaatacagtgactgcacttgggacagactatttgtatgtctataggacatgaagcgtgcagcttggagagcaaaggcacttcctcccacgaccttactgcagtaaccataccgatcaaattcccagggacattctgtcattgcagtagctcagacctgtcttttcttgcacaccagctgtgctcttgagaaaatgtaaaggctgccattatggatattaggtatcccaacataaccatctggagtgtgtccagtttatttttcataggaccaatttttatttgcagcttaggtttttatatgaagttgcattattgtggacttggctgtcttgtgatgtatttttttcatatgtatcctgtgccatactattgttaaaatgaactgttgctattgtgagatggatttcctttcgaatggcactaccttagggacattctagtattgcttctattgtttgggcattgtggataatgtacagatttaaaaacaaatcttgttgctgatttgtccatttctttccctgcactttgttacatctgggatacagtctaactcatctgacttaatatgcatttaaaaaaatgccataactattaaacaccttgtttacagacagatgaaataaatttattccaaccaaatactccaaaaaaaaaaaaaaaaaaaaaaaaaaaaaaaaaaaaaaaaaaaaaaa

SEQ ID NO: 285 - DNA, 1196 bp, Mus musculus
ctgaggcggagggtgcgccgcgccggtcaggagtttctttcattttctagaactgcacgttgaaccctgggaaccatgagcaactacagtgtgtcattggtcggcccagctccttggggtttccggctccaaggtggcaaggatttcaacatgcctctgacaatctctagtctgaaggatggtggcaaggcatctcaggcacatgtcagaataggcgacgtggttctcagcatcgatgggatcagtgcacagggaatgacgcatcttgaagcccagaacaagattaaggcttgtacgggctccttgaatatgactctacaaagaacttcagctgcagccaagagtgagccggtttccgtccagaagggtgaacctaaggaagtagttaagcctgtgcccattacatctcctgctgtatccaaagtcacttccactaccaacatggcctacaataaagcaccacggccctttggttctgtgtcttcaccaaaagtcacatccatcccatcaccatcgtctgcgttcaccccagcccatgccgccacttcatcacatgcttcccccacacctgtggccgctgccactcccctccacctctctgcatccggactgcatgttagtgccaatcttagtgctgaccagtgttcatctccaccgaacactggtaaacctgcagttaatgtcccacggcagcccacagtcaccagcgtgtgttccgattctgctcaggagctagcaaagggacagagaaaaggatcccagggtgacattaagcagcaaaatggcccaccaagaaaacacattgtggagcgcaacacggagttttatcacatacccactcacagtgatgccagcaagaaacggctgattgaggacactgaggactggcgcccccggactggaacgactcagtctcgttctttccggatccttgcccagatcactgggactgagcatctgacagaatctgaaaatgacaatacgaagaaggcaaaggaaaagataccccttcacgtctttagtcccaaatacacaaaattacgtgactggcaccatgaagtttcagcacgtgctcttaatgtacagtgactctgagccctgctcccccacctaagcagctagcacatacctttcattcacgttttctttcttccatctatagcaaaatctgttttacatttgactcgtgaaaacta

SEQ ID NO: 286 - DNA, 3795 bp, Mus musculus
ggcttccgccagggcgcgcggaagtgtggagtgcgcatgcacacggggccgcggactatggccacctcctccgtgtctaagggctgctttgtgtttaaaccagacttcaaaaaaagaaaggtctttgtgccaatagaggattattttaataatgaggaacttgactctgaggacagtaaacttcgatttgaaacatatagcttactatggcaacggatgaaatctgaaacagagcaattacaggaggaattaaatgaaaatctgtttgataacctagttgactttctgcagaagtcccatcctgaattccagaaaaattcaagagactggggctctcaaatgaaattcagagaaattccaacagctgctcttatttttggtgtgaatgtcacggatcatgatgtgatactcagaagtctaacagagacccttcagaataatgtcacaccatatgtagtctcactgcaagctaaggattgtcccgatgtgaaacattttttacaaaagtttacctcacagttgatggactgctgtgtagacaggcattccaaggaggtgacaagtggtaaggccctgaagaagacaaattattcaatggattccctttgtagttggtattcggcagtcacacagaaagcagaccacaaagtgacaatcaaaaagaggacagcatctggccattggcggtcccctcctgtggtgcttatcttaaagagcatggagagtttcaccagcaaagtcctccaagacttcataactatcagcagtcagcatctgcatgagtttccgctaattctgatttttgggatcgccacatctcctgttattatccaccgactgcttcctcattcagtgtcatcgctgttgtgtgtagaactgttccagtctctgtcttgcgagcaacacctgacagtagttcttgataagctacttcttacacctcagtttccctttaaactaagtaaaaaggcattacaggttctgaccaacatctttttgtatcatgatttctcaattcaaagcttcatcaaaggaattaagctttctctactagaacatttttattcccagcccctaagtgttctgtgctgcgatctctcagaagccaagaaaagagtaaatgttttctcagttagtcaatgtgaaaacatccgccgccttccttcatttaggaggtacgtggaaaaccagcctttgggaaagcaagtggcactgctgacaaatgagaccttcttaaaggagaaaactcaatcattgctggaagacctgcatgtttaccatatcaattacttccttgtcttgagatgtcttcataattttacctcttctcttcccaagtacccactgggtcgacagattagggagctgtattgcacatgtttagaaaagaagatatgggattcggaggagtacaagtcagccttgcagctgctgagaatgctggcaaaggatgaactggtgagcatacttcagcgctgtattgaggttttagattcctctactgaaaagcagcttggcaacacaacacagaaaataaaggatttcctgacccagtttcagaacctcgatgcagatagcaaagaggaagaggatgcctgtggatcacagccaaaggggctgcagaagacagacctgtatcaccttcagaagtccttactagaaatgaaagagctaaggagaactaagaagccaaccaagtttgaaatgctcagagaaaatgttatgaacttcatcgacaacttagtgagagactaccttctgcctcctgagagccagcctctgcatgaggtagtgtacttcagtgctgccaacacactccgtgagcacttaaatgctgctccaagaatcgctcttcacactgcactcaacaacccatactattacctgaagaatgaagaactggaaggatgtattccaaatactgcccctgacatctgcatagcatacaaactgcacctggagtgtagcctgctgatcaacctcgtcgactgggcagaggcttttgcaacagttgtgacagctgctgagaaaatggatgcaaattctacagtctcagaagaaatgagtgaagttattcatgctcgatttattcgagctgtttctgaattagaacttttaggctttataaaacctacgaaacagaagactgaccatgttgcaaggcttacatggggaggctgttaaacagcaagagagtgaagacaagaagagttccatgtccaacttgcatatttgtatcaaaacgtttttggagtacttcaaagactaacaaatgcataaagcctttatatgttatcagtatacattgcttcattcttgcttgtctagtgtgtaaatgctagaacttcttacgcatagctctcagcagcaccccaaacgccagcacactgtaaagttagacactgtaaacatctttcaggtgttttccttgctagaaaggctctaaaatcacctcagcctctccatttcttataatcttggcaacttaccaggcccaaagctatttggctttatacttaataaacattcatatgaacagccacggagacttacaaccagtaagggccttcacaaactgctcccctaacttacaaaactcagaaatgtaaaggtccagtgaaataatatcgtatctttcatgacaagaacttaagaatcagacacataaaactcattatttaatgttcaactctcaagagaattgtaccaaaattgttcacaaatgattcagagagtccatgtccagaaaaaaatttaaaagcctctgacttgtgttgcaaggtatatgcaagattatgatcctttctccatgccccccatcccgaagtgctaagattataaggaatttacattatgcccagacgagaaaacaggtctttaaacaacacaacattttgtgcatataaaatacagaggaactggtgttaatactggcatatttttatcttgtctgaggcatgttttcttttcctaggcattgcctgcatttgtgcgtgtgtgcacattgacttctcatactatcaaaaggacctgtaggactgaaccattgaactgattgtgtgtaattacttggtatcctataaaaactcaatccttcattgaggtgcctggcacttactagatattttagaaacaagatcagtgttttccttgtcctttatgtagcaaagcagacctcacttgagcaaaagtataggaatgaaaaaaactacccaggaggacttatgggtgaccccactaggcaggcaacagcagtaaccaatatcctaggatggggacaccaagacagagacagctaggatggatcagggggttcaaataataggaattgaatgagtaggacaagagtgcaggtagtgaagctttgttttcttcggtcagaagcaaaagggtaaagcctttcaatgatcaacacgtgtgagaacagtgaggcctgatgcagcaaagcaaccactagttagctgaccaagagcagcggggttggtgtcactgttgattaactacaattagatgcacatttagatccttaaaatcccttctgcttataaactagaagcattgctatcagtgggctgctatggctactgctcggtggtgggatctctaagaactaaggtataatgggaagtctgcgagtgtggccgcaaggaaaatgggaggatccaacagtcctctttattcttttgcttcctggctgatgagctaacagtttagctctaaactggactctagtcatgtcttctgcctcaactgatcatacgccttcaaaatgcaattgaaataaacttcctgacc

SEQ ID NO: 287 - DNA, 799 bp, Mus musculus
gtggtgctttggtgtcttgagaggctagacttccacgagtgggagggaaaagttggacctacatctctgaggggttcattgggcaactgtactggatcttcagtcgtttgggcggcgccatggcgggaagaaaaggaactgctaaagtagacttcttgaaggagatcgagaaagaggcccagcagaagtgggaagctgagaaagtgtttgaagtcagtgcctcccggctggagaagcagaagcagagcagcaagggcaaatactttgtcaccttcccatatccatacatgaatggacgccttcatttgggacacacgttttccttatccaagtgtgagtttgcagtaggataccagagattaaaaggaaaaagctgtctgtttccctttgggttgcactgtactggtatgcctattaaggcatgcgctgacaagctgaaaagagaaatagagctgtatggctgccctcctgattttcccgaggaagaagaggaagaggaagaaagcagtgctaaacctggagatatagtagtgagggataaagccaaagggaaaaagagcaaagctgccgccaaagcaggatcttctaagtaccagtgggacattatgaaatcccttgggctctctgatgacgacatagtgaagttttctgaagcagagcactggcttgattatttcccaccactggccgttcaggatctgaagactataggtttgaaggtagactggcggcgctccttcatcaccacggacgtgaatccttactacgattcctttgtcaggtggcagtttttaacttt

SEQ ID NO: 288 - DNA, 3080 bp, Mus musculus
ggagttcgacttccggtggcgcaaagcgtgccgggatcagcttgcggcaaacctccttccccggcccgtagagagaccaccgttagcgccgctcctgctcgcacagcctgctctcggccacacgcttggccgctgcggctcccgcagtgttcggcccggtccacttggtttcccaggcagccggcgtgcgctcagctgcggcttcggcagacatgttgtgaggcggcggcgcgggtgcctgaaggatggtttggccgaggcggctgcaaccgctgctggtggcggcgtcctcgggggctccggctctgtagagctgaccctgctcagtgtccgcccgggaccgcggccgggcgggtattcctctgtcttgcgtgcgctcccgtgccgtttaggttcggttagacgacagcgccagtccgtttgaggcgacacgcagggtggttctccagccctgggagtggtgtccctagaaccctcagccccctgacctttccttcatattcccactaaaatctctcacacagtgggtgttccctgccctccagccctccttcctggtttctgcactctcttctctgagtttcccggaccccaacatccctctccagggacagcctgttgagaaatcttcgtggagtggtggaccagaggcgaggagtttaaaagttggggcttgaaagacaggaagatacgatggcttcctcgtctggcaacgacgatgatctcactatccccagagctgctataaataagatgatcaaagagactcttcctaatgtccgggtggccaacgatgcccgagagctggtagtgaactgctgcacggaattcattcaccttatatcttctgaagccaacgagatttgtaacaagtcagaaaagaagacaatttcaccagagcatgttatacaagcactggaaagtttgggctttggctcttacatcagtgaagtaaaagaagtcttacaagaatgcaagacagtagcattaaaaagaagaaaggccagttctcgtttggaaaacctcggcattcctgaagaggaattattgagacagcaacaggaattatttgcaaaagctagacagcaacaagcagaattggcccaacaggaatggcttcaaatgcagcaagcagctcaacaagcccagctggctgcagcctcagccagcgcgtccactcaagcaggatcttcacaagacgaagaagatgatgatgacatctgacattcaccacctgggctttcaagaaaacagtgaaagatatgcctatctgtaattctgtatgcatcttggtggacttaccattggtattctagagacgtctgttgtctggtttcaactactgtgctatacatgtaaaactgtctctttgaactattgaaaatttaaggttaagtataatatcacctttggatttgtaatggtgtttctggaatcttagaccagtgtgaaccctttatttggtcaataaacagtgttacagaaaacttcaggtttataaaatacagtgaaatttatagagatctcttaatctgtatttgtattttgtctgccctttgaactgaactaaaattgagaatttatatagcgatggggcatgatgtgatgcagaatacattgaatcaggttggtgaaaaagttcagttctatatagtatctaaattttttgtcttttaaggtgagtatatatgcaggcaacaattatatatgctcagataaatatacttgtttagaggaaatctcaaataagacattcaataactaggaaagaaatgtactcactagtagttgtataaatttggtgagttatatttttgattttgttactgttttgtgtaacagtgaagactggttttattatagtataatttatcttgaactacactatgccatttcagagactggctaatcttgaagattgtcacaattcttactgtttcactccagttcagtaattgttcatagtcttagttgtttcgtccattttttgagtgtataggtgggacttgtgagacagttgcttgggttctgttagtttaactgaggttgctggatattcaaacctttgctaggggaaataaacgaaagctaatgaacatgtttgctatgaaaaagggctttaaatttttatttaacatgtagtgtacttattgtttggttttagtgtagcatttacattttctcgactaggtggcctaaagaatccaatgctaacttttgataataacatcattgtccccgtcatcataatttagtagtagctttaaaagttttgtgtttgcttaaaaagtgtcataactgcagccctatatgaagtgttaacttgcttgttaaaaggaagcagctttaatttggttccagtgcataaagtgtggtagtgtttgtgagagggatccagtgtatttggtgaaatggcatattacttatattttggaaacaaaaaaatgccacctaagataataatataagtcattaagttcctatgtcagttgccaagccatttaaatttctgtattcaccaagccccagaagagattctagctgctaggatttgaattttgaaagctaagaaatgtttataagtattagatttcttaatattcatatttttgagttttagaagggaaatttatatgcatattgttatgcatttatcagatattcttcccccatataacaaaaagggtagtaattttgctgaatgttttatgttgaagttatttcaaggtatttcatggatatgcccatgacatatttggaaaaaatagaaggaattgattttttcaaaaaggttaagtaccaaaggtaggtagtttagtctacagaaataagttagtcacttttggcttttctaatttgtactgtaacattcttttattttgttttaaatatatgtttctcaagtaaacaatttaggtaattttccatacctttttctttctgatgcagacttcaggttaattaatattttactgcatctgatgatgtattatatgtttgaagcctagtgacttttaattttgatgttcttgtgatttcatatgttgtattcttcaagcaataaaattctgatgtgtttt

SEQ ID NO: 289 - DNA, 2111 bp, Mus musculus
gttctcgctcactggttctctccctcgctccggtgcatcattgcagctgcgtcctctcggatcctcattacgccggcccgcgtccgtgggtgcgcggcccctgcgtccacgcatctttcgcatcccatctgccagccgctcggcgcccgcctcccccctccggtaccgcattgccgtactgcaggggcgcagtgcattgcgccggcaccgtcaataggtggaccccctcctggagagataaaaccgccggcgccggcgccaccagtccttctgactgagtcctcggctctggagttcctgcccagcatataccctcaaccccaaaccagagcccccacagtgccagcccctccctcacccaggcagaatgggcaaggagaagacacacatcaacattgtggtcattggccacgtggactcaggcaagtccaccacgacaggccacctcatctacaagtgtggtggcatcgacaagcggaccatcgagaagtttgagaaggaggcagcagagatggggaagggctcttttaaatatgcctgggtgctggacaagctgaaggccgagcgggaacgaggcatcaccatcgacatctccctctggaagtttgagaccaccaagtactacatcaccatcatcgatgctccaggacaccgagacttcatcaagaatatgattacaggcacatcccaggcggactgcgcagtgctgatcgtggcagccggtgtgggcgagtttgaggcgggcatctccaagaacgggcaaacccgggaacacgcactcctggcctacactctgggtgtgaagcagctcattgtgggtgtcaacaagatggactccacggaaccagcctacagcgagaagcgctatgatgagattgttaaggaggtcagcgcctacatcaagaagatcggctacaacccagccacggtgcccttcgtgcccatctcgggctggcatggtgacaacatgctggagccttcacctaatatgccatggttcaagggctggaaagtagagcgtaaggaaggaaatgcaagcggcgtgtccctgctggaagccctggacacaatcctgccccccacccgccccactgacaagccccttcgtctgcctctgcaggatgtgtacaagattgggggcattgggaccgtgcctgtgggccgagtggagaccggtatcctccggcctggtatggtggtgacctttgcgccagtcaacatcaccacagaggtgaagtctgtggaaatgcaccatgaggcacttagcgaggccctgcctggtgacaatgtcgggttcaatgtgaagaatgtgtccgttaaggatattcgccggggcaatgtctgcggggacagcaaagctgacccgcctcaggaggctgcccagttcacctctcaggttatcatcctgaaccaccctgggcaaatcagcgctggctactcgccagtcatcgactgtcacacggcccacattgcctgcaagtttgccgagctaaaggagaagattgaccgtcgttctggcaagaagctggaggataaccccaagtccctgaagtctggtgatgcagccattgttgagatggtccctggaaaacccatgtgtgtggagagcttctcacagtacccacctctcggccgcttcgccgtgcgcgacatgcggcagactgtggccgtgggcgtcatcaagaacgtggagaagaagagcggcggcgcaggcaaggtcaccaagtccgcacagaaggctcagaaagcgggcaagtgaagcgcgggcgcccgcggcgtggccctccccaacggcgccgcgccgcgcccccagccccgcccccggcactggccccgcccccgccccaggcgcggcccctctgccccgaccccctgccaggcgcatgtctgcacctccgcttgtaagaggctctacgtcagcgactggatgctcgccatcaaagtccagtggaaattcttcaagaggaaaagcgcccccgccccaggcttccgcgccagcgctcaccacgctcagtgcccgttttcccaataaactgagcgaccccaaaaaaaaaaaaaaaaaaaaaaaaaaaaaaaaaaaaaaaaaaaaaaaaaaaaaaaaaaaaaaaaaa

SEQ ID NO: 290 - DNA, 2033 bp, Mus musculus
atccggcttctctctgccgcctgtgcgccccgtgacgccgacagagccttgggtttaggttgcccgccgcgcttctcacttctgccgcgggtggaacagccccggaggcttccatcctcttcctgaggtgtcggggctcggccccccgcctccatcttcgcgtctcaggatggcgagcagcagcggctccaaggccgaatttatcgtcggtggaaaatacaaactggtgcggaagatcggatctggctctttcggggacatttatctagcgatcaacatcaccaatggcgaggaagtggcagtgaaactagaatcccagaaggccaggcatccccagttgctgtacgagagcaaactgtataagattcttcaaggtggggttggcatccctcacatacggtggtatgggcaagaaaaagactataatgtactagtcatggatctcctgggacccagccttgaagacctcttcaacttctgttcaaggaggttcactatgaagaccgtacttatgttagctgaccagatgatcagtagaattgaatatgtgcatacaaagaattttatacacagagacattaaaccagataacttcctaatgggtattgggcgtcactgtaataagttattccttattgattttggtttggccaaaaagtacagagacaacaggacaaggcaacacataccatacagagaagataaaaacctcactggcactgcccgatacgccagcatcaatgcacatcttggtattgagcagagtcgccgagatgacatggaatctttaggatatgttttgatgtattttaatagaaccagtctgccgtggcaaggactgaaggctgcaacaaagaaacaaaaatatgaaaagattagtgaaaagaagatgtccactcctgttgaggtgttgtgtaaggggtttcctgcagaatttgccatgtacttaaattactgtcgtgggctgcgctttgaggaagctccggattacatgtatctgaggcagctattccgcatccttttcaggaccctgaaccaccaatatgactacacatttgattggacgatgttaaagcagaaagcagcccagcaggcagcctcttccagtgggcagggtcagcaggcccaaacccccacaggtttctaagcatgaattgtggaagagaagcagcagagcagacgattggagcagcgtttgtttctccccaaacctagacattttagttcatatgtacactagccagtggttgtggacaaccatttacttggtgtaaagaacttcatttcggtataaactggctctgggtagcactgcggatcctgagctgtagccactgtccttgtgaatattaactgaggtagtgaaacatggtgtccggttttctattgcattttttttcaagtggaaaagttaactaaatggttgacacacaaattggtggagaaattgtgcatatgccaatttttattttatttttttgttaaaatcttttattttgaactatactgctttgagatctcatttcagaagaacggcatgaacagtcttcagccacagttgtgatggttgtaaatgttcacaattgtgtgttcttagggttttccatccctggggtttgcaagttgttaacttaaaacattcttaaaatggctggcttcttgtttgcaagccagctgatatggtagcaaccaaagattccagtgtttgagcatttgaaagactctgcctgcttacctgtgctagaaataacagcatctaaagtgaagacttaagaaaaaaaacatagcgactactagattctctttaggactctgcattaactctataatgttcttgctattaaaaaaagcatatttgtcacggaaatttagttaccgtcttacaactgaacatgtatgtgtgttgcttagataaatgtaatcactgtaaacatctatacgatctgggattttgtttttattttgaaatgggagctttttgtttacaagttcattaaaaactaaaaactgttaaaaaaaaaaaaaaaaaaaaa

SEQ ID NO: 291 - DNA, 1113 bp, Mus musculus
gctgagtaaagaggcgctgatctgcaccctcaccgtcttcctctggaatcaacataaagttcagaaaccatgtctcgaagatatgactccaggaccacaatattttctccagaaggtcgcttataccaagtggaatatgccatggaagccattggacatgcaggcacctgtttggggattttagccaatgatggagttttgcttgcagcggagaggcgcaacatccacaagcttcttgatgaagtcttcttttctgagaaaatttataaacttaatgaggacatggcttgcagcgtggcaggcataacatctgatgctaacgttctgactaacgagctaaggctcattgctcaacggtacttattacagtatcaggagccaattccctgtgagcagttggttacagcactgtgtgatatcaaacaggcgtacacacagtttggaggcaaacgtccctttggtgtttctttgctgtatattggctgggataagcactatggctttcagctctatcagagtgacccaagtggaaactatggcggatggaaagccacatgcattgggaacaacagtgctgcggctgtgtcaatgttgaaacaagactacaaagaaggagaaatgactctgaagtcagcgcttgctctggctgttaaggtgctaaataagacaatggatgttagtaaactgtcagctgaaaaagtggaaatcgccacactaacaagagagagtgggaagacggtgatcagagtcctcaagcaaaaggaagtggaacagttgatcaaaaaacatgaagaggaagaagctaaggctgagcgggagaagaaagaaaaagaacagagagaaaaggataaatagacagaatcacggattttataactccttagaggcaccaattcacttaggagctgtcctggccttccaccccggaagtgttttcttgtattatcttccttaccttggccatcggggaaataggacattacatactgaattgggtccatgtctgtccagttggatgctttattgtaatgatggacatctttataaacatcttaatctcaacacataatttttggaataaaacttggaaagattgaaaaaaaaaaaaaaaaa

SEQ ID NO: 292 - DNA, 4726 bp, Mus musculus
gctgctctcccccgcacctccccgcggtggcttcttgggcgaacagcgtgcggctgcgtcatcgccagtggccggtttgaatgaggcttgtcgcaccggagctgccgcctccacctcgcttccaccccggccgcctccacgagttgcttcgtattcctcggctgcccttgtcagacccagcctcccgcgccttttcttccttcctgcctcgccatgccactctactctgttacagtaaaatggggaaaggagaagtttgaaggtgtagaattgaatactgatgaacctccaatggtgttcaaagcccagctttttgcattgactggagtccagccagccagacaaaaagttatggtgaaaggaggaaccctgaaggatgatgactggggaaacatcaaaatgaaaaatggaatgactgtactaatgatggggtcagcagatgctcttccagaagaaccctctgctaaaactgtcttcgtagaagacatgacagaagaacagttagcaaccgctatggaattgccatgtggattgacaaaccttggtaacacttgttacatgaatgctacagttcagtgtattcgttctgtgcctgaactcaaagatgcccttaaaaggtatgcaggtgcgttgagagcttcaggagaaatggcttcagcacagtatattactgcagctcttagagatttgtttgattccatggataaaacttcttctagtatcccacctattattctgctgcagtttctgcacatggcctttccacagtttgcagagaagggcgaacaagggcagtatcttcagcaggatgctaacgaatgctggatacaaatgatgagagtcctgcaacagaaactagaagccatagaggatgattctggtagagagacggattcttcatctgcaccagcggtgacaccttctaaaaagaaaagcttaattgatcaatattttggtgttgagtttgaaactaccatgaaatgtacagaatctgaagaagaagaggtcaccaaaggaaaggaaaatcaacttcaacttagttgtttcattaaccaggaagtgaagtatcttttcacagggctgaaattgcgacttcaggaagaaattactaaacagtctccaacactgcagagaaatgctttgtacatcaaatcttctaagatcagccggctacctgcttacttaactattcaaatggttcgatttttttataaagagaaagaatctgtgaacgccaaagttcttaaggatgttaagtttcctcttatgttggatgtgtatgaactctgcacaccagaacttcaagagaaaatggtctcttttcggtcaaaattcaaggatctagaagataaaaaagtgaatcagcaaccaaatgcaaatgacaagaatagtcctccgaaagagattaagtatgaacccttttcatttgctgacgatattggctccaataattgtggctactatgacttacaagcagtgttaactcaccagggaagatctagttcttcaggtcattatgtatcatgggtgagaagaaaacaagatgaatggatcaaatttgatgatgataaggtcagcattgtaaccccagaagatattctgcggctgtctggtggtggagactggcacattgcttatgttctactttatgggcctcgaagagttgaaataatggaagaagaaagtgaacagtaatcttcaatttagctatttatgcttaggtgtgaatgtttttgttgttgttgttgaacatttctataatcttgagctctaaagaaaatgagaacagaaccaagccacttgtgcatcttcaatcttaagactacgggaaattacgtttgggtcctaccttgtatagaggtagcttcaagacattctttaaaaatctcattttttgcattaatccttagaaattcttggctgaaatccattttatcccttgccttttcagcccaagctttagcagtgatgtttattgcacacctatctgttgttcttgcatggttactatcaccttcagtagctgcccgtcctctgccttatctaaccaatatttttctaggaaggtggaaaagtgttgctctcttcgtgtaactcagtgctgctgtccacatcccatcaactgggtgcaatcaagtattgtccagactgactgttgctggcctttcatgactttacaataaattgtgatcaataagaacacacttgattatacacttattattgtgtctctaatgtactgtggtttatatgttaaactttgcattggtttttgtagtaatcataatgtgtaaacaagctctggttgcttggaaaccaaggatatttaataataaaaataaggaaaaagagggattaacaacttttgacatttctttttagtattagagcttggcttaagagtcaaatgaattcagtactatacagtttctgcaaatggctaataatgctaagcagtcaaggatctatttaaaatacaagaaactttagcttgtccagtgttattacaaaagaaatacaaagtagtaaaggtgatgagttcctttggacagtgaattctgtgatcagtttcattccctcacacgtttgttgtttctattttctttcccaaagtctttgtgcccatcttgaaagttactgatttttaagattaaggtatacattaccaagagtattgtttattaatctattgactacccagtgagtaagtccttagatgtttcaggaactttagcaatctaaggaaaggatgaagtgttgaatattcgtgatctggtctgatttgagttgactaggaatgtcaggaatatcatgacatcttccacctcatgttttaatgctctgtaaagtacccaagattcctataggataataaatctgtaatagtgtgggtaagtcagcattttaggtttgtaaatagtttgctaacttaaacattattagcagttaagacgccttacaatggggagtgaaacatggaatgaaacagtgctgtgtgtactgtaatagtttgtgtcatgacccctgggattcagtgttatttgctagaacagttgtagaacgaaggaatttggcacctgtgttttcctactaaaccaggtgaggtagatttagaacaaatatgccaaaactatgtttagaatgcattaagaaaactattatacaaaaagtgtggtgatagtttatttgacctaaaaaggcattccaaaaataattctttaaagtagaaattggacttccatcattttgttttaaataaggtgttaagtgttttagaatgaggtaaaaaaacattctcctccctttcaatccctgaacttgccttaatttgcttaatgcagaagacatctggaggccagggttgtgcttagtcactgcttccccagctagtagagtgcagttcaagcaagaacacttaacagtggtctgcccagtcgcccttcactagtatactaaacacccacaggaaatgctgtatgggactagaacacgaacatcttaaccgtcagccagtaccacacatgctctgctacatatagggtattttcacatctcaagtgaactgacaggaatccctgggtgtttaaagacttaaggaggtcaagtaatctttgtaaagctaaaggagtagttgggtcttagactccacttcatataaacttagagctagcaaacaaacattttctgttttggacaaacagctaatgatttggtttttgcaggcccctggctatcagtttgaactctttgctattgtagtgtcagcatgtcagagtgccaggaaaacacttaaaactatccatggtttgctgatcctcttctctccagtcctaaggtttcagaagtgtcatcttgtaatttcagaataaaattttataaccgatagcatgcaggaaactaatttgggacagtactgttagtagtactcatttaacttcactgtagaaatacttaacaaaaattggtgtgatcttgaggtccttttactttgttttcccaccctgttctccactccaatgcctgttctgtatgtggtttttggagcaccagccaactgtacaatagctgttataaaagtgtttattgtttaccaaaaccagtgaaccttttatcaaatgctgcttggtaacaaaatcttatcactgtttaataaaaaagaaaagaaaggaagaaagctaactgtttgtttcagtgtcattagttagactttctgcaaggtcacttaatccagacttgtttagtgcactaatcaggttatcagttgttgcatgaactccttcttgatcttgccaggcaacaaggagctgcttggctctcatcttcatgtcttcactgtcacactcaatctgcctaatatcagagtctttaatttccaggtaaggagccaaaatcttccactgctcaccaagtttgttggcaaatgactctatctgctcccctgttataggtttatctcgccgaacatctggacctagaaaatatagagatgtgcaattaaagtatctgaaataactgcaaagctgaaatgaccactgggttactagtcccctaaaactttactttaaaacttgaaaattttccataggcgtatacactcaaagctattttaattagaaacactttcttgtagaggagatgctccaattcccactagttagagtttaagctctgctgtaaaacacctttcttctttacctcttaaaattatcatttccacatttcatct

SEQ ID NO: 293 - DNA, 3138 bp, Mus musculus
tggcacacatcctgcctcttgtgcctgctgcagggcttctgctctgaccagacctggtaaggttgctggagcctgagtcatgtcacttcatccagttatcctgctggtgcttgtgctgtgcctgggatggaaaattaacacacaggaggatacatcttggctaaagacatacagcatttacatttttactgtggtctctgtgattttcctcctttgtctttccgcccttctgttctgcttcctcaggcaccgtcagaaaaagcagggactcccaaacaacaaaagacagcagcagaggccagaagagaggctaaatctagctactaatggcctggagatgactccagacatagttgcagatgacaggcttcctgaggacagatggacagaaacctggaccccagttgcaggagaccttcaagaggtgacgtatatccagctggaccatcactccctcacacagagggcagtcggagctgtgacctcacagagcacagatatggctgagtccagcacatatgcagccatcatcagacactgagcctgggcacacctggagacacacatggaaaagcctgaagaatccactagggccttcttttgggatcagcctggtgtggaaagctaggtccctgttccccatccagatgatgaattgtatatgtgttagtatcatcacttaggaagactatattgcaataactttcagagccctagttacacttacctagctatttccagagacacagttatagctcttttagctgtttcttcagacccatccacgtcccatattatttaatgaatagcactgtaattgtccagctgcctttacatccccagttgtgtaatgagcccagtgaaccctaaaggcttccttggatctccctgctgactctgactgggatgtactcatgcagctgaaggctgagtcccttctcagtgccaggccttatggagtgcatcatgggtatttttgaagatggagcatctacagtccatgtgggtcttggaatacagactgtaaggactcaaactctgttttcattgttatccaaagatgagtggagaaatgaaggctacaaaagggtgcatataattcccttttctttaaaatatatgtttaattgaccaagattgtgcatactcaagtgtgaactatcagaactcggtttgacattgtgtatgtagccattatcacaaatactcaacacaactgccactggatgacttgaacatattcactgatgattgaactttgggttggtgtttcttgatggtatgtgttgatcaggattggaagaaaaaggagcactgaaagggaaaggcaggctgagggtgggtagagggaggtgttctatctgtgtacacctatactcagtgatacactgggagatacacagatatgaatacgcacacaaacatatgtacacaagtatattagtgcacatggagtggaagaacactgaatcactgtgagattatatttgtcaatatctctgctccataccccttacctggagtcagattcagtgatcccatacccatgcacatatagtcagcactagttagactcagagacagatcagcaacaacaacagtggtaacagtaataacttcaaaggacataccaggacatggtggcacacacctttaatccttctacttaggagacagaggcagatggtttttgtgagttctagaccagccttgtgtatgtatcatgttccaggccagccagggctgcacagtgagaccctgtttcaaaaaatagctgaaactaccccaaaagacatgaagtccagcatgagacaaatcctacaacggtaggacccaaagggagtttggtagaggtattggagagggtcatttccaaacattgatttttcacttttgtgaaaatttcagaaataaatttaaaatattagttaaaaaagaaaaatactcatatgaacttacaaaaattgaagcagcaagcacaggctctgcacaggtttgcaccaggttctgtatatatattgtgacttccagtttagttacttatggaactcttgagtgtgtgaacaaatggatctctgattctctgtcttcttgtgggctccttttccttctgctggtttgccttatctgactttgatgtggtgttttttgttgtaacttattataagaagataaaagaaaagaaaaatacccagaggaccactagggggaatgagagtgtctcattttgatggtcaaaataaacatggctgcagaaaaaacaaaaacagaaacaaaaaacaacaacaaaaaaacccaaccaaccatcaccaaaaacaaagatcccccaactcccaaacctgattgttaaaacaatgctttcctaaaaaatgcccagtaagaaatcctctcacaaggagaaaattggatggtgtcactctggtaggatacagagaggcagacttactgacatatacacatgaagacataaccagcatgggagagatagcttgatgattaagagcactggctactcttgtagaagccctaggatcaattatcagcacccaccttgtggtgcacaatcacctctaactccagctctagaggatttgacacatttttttttaagaaaccattttatttctatgtcctttagtagtatttaggtttcccatatatctcttgcatatctagtctcaggttcatggtcctgtgtacagtgtcaggcatgggtaccagttctttgagtgccaattacatattggttggttagttctagaagctttgtatcactattgtactagtccttcttgtaggcaggtacattgtagattcaaaggtttgtaatcaggttggtttttacctttcttcttttgtagtgtgcactgtacctcatagtactctgaacacttgtccgtatgggtgaaggctacaggtcatctcttgctcaacttctccatgttcaatgaattttgaaggtgtggtgttctgaactaatacactgtagtcaatttgtaaagagcaactaatagctttggaaagagacttggtggtttgggggttcccatggccaacacatcaaatagatgtaacccatttccagaatgggaggcagaaaactatatatgtaataaataaataaatctttaaagaagg

SEQ ID NO: 294 - DNA, 1302 bp, Mus musculus
atggtggccgaggtgggaggtgcccctgttcgctatggagcggcaccagtgagggctcggagcagcaccgagaggcctaggccacggtggcgttcgcctatctcttcaagtacatcagccagcgacacaggtgttggtaaatcgtgcttattgctacagtttacagacaagaggtttcagccggtgcatgacctcacaattggtgtagagtttggtgctcagatgataaagattgatgggaaagagataaaactccagatctgggatacagcagggcaagagtccttttgttctatcacaaggtcatattacagaggtgcagcgggggctttactagtgtatgatattacaaggagagacactttcaaccacttgacaacctggttagaagatgcccgtcagcattccaattccaacatggtcatcacgcttattggaaataaaagtgacttagaatctaggagagaagagaaaagggaagaaggtgaagcttttgcacgagagcatggacttatcttcatggaaacttctgccaagacggcttctaatgtagaggaggcatttattaacacagcaaaagaaatttatgaaaaaaagctaagaaggggtctttgacattaataatgaggcaaacggcattaaaattagccctcagcacgctgttaccaacgcatctcatggaagcaaccaaggcggaccgcaggcagggggaggctgctgttgagtctggtgttaccggctgcccagtggagccacgcactctgtcaccctctttcctcatgctcagctgagacatgaaactattgaaatggctttatgtcacaggagactttaatccttccgattcttgtataactttgagtaaatggttaatgttcactttaaaagacagattttggagattgtattcatatctatttgcatttgatttctaggccaattgatgtgattattttttgttaaatgttgtcttgtgccattaactacgagctgaattgtattagacactacaaagtcatggtattttaaatcagtttgtgtagttaggtttcccaacacctgcagttacctaatgtttagcattataggactgtcctcaaaaagtttgtcaactttcaaggatagaaggaaaaccagaactctttgacttctgtatttatcatttgctttctgtatatatagtttaataacctgcttgggtgtgatttgccaagcttgaactctaatgcatttgcataaattctaccactgttcggagcttgaagctacagaagcattgttaggaattgcttggacactgac

SEQ ID NO: 295 - DNA, 2455 bp, Mus musculus
gaacgggcttcgagctgcgtctgtccatacgccctgatctgaggcctccctagcgcgtggtttctgctgcagaacctgagaccatggccaaaatagcacagggtgccatgtaccgaggctctgtccacgacttcccagagtttgacgcaaatcaggatgctgaggccttgtacacagccatgaagggcttcggcagtgacaaggagtccatactggagctgatcacctcccgcagcaacaagcagaggcaggagatctgccagaattacaagtccctgtatggcaaggacctcatcgaagacttgaagtatgagttgacggggaagttcgagcggctgatagtgaacctgatgaggccacttgcctattgtgacgccaaagagattaaagacgccatctcgggcgttggcacagatgagaagtgccttattgaaattttggcttcccggaccaatgagcagatgcaccagctggtggccgcatacaaagacgcctatgagcgagacctggaatctgacatcattggagacacttccggccacttccagaagatgctggtggtactgctccagggaacccgggagaatgacgatgttgtgagcgaggatttggtccagcaggatgtccaggacctgtatgaggcaggggaactgaaatggggaacagatgaggcccagttcatctacatcttgggaaaccgcagcaaacagcacctacgactggtgtttgatgagtatctgaagaccacagggaagcccatcgaagccagtatcagaggggagctgtctggagactttgagaagctgatgttggccgtggtgaagtgcatccgaagcaccccggagtattttgcggaaaggctgttcaaagccatgaagggcctagggacccgagacaacactctgatccgcatcatggtctccaggagcgagctggatatgcttgacatccgggagatcttccggaccaagtatgagaagtcactctacagcatgatcaagaatgatacttccggtgaatacaagaaggctctgctgaagctgtgtggaggagatgatgatgccgctggccagttcttcccggaggcagcacaggtggcctatcagatgtgggaacttagtgcagtgtcccgagtcgagctgaagggtactgtgtgtgcagccaatgatttcaaccctgacgctgatgccaaggccctgcggaaagccatgaagggaattggaactgatgaagccaccatcatcgacatcgtcacccaccggagcaacgcccagcggcagcagatccggcagaccttcaaatctcactttggccgggatttaatggctgacctgaagtcagagatctcgggagacctggcaaggctgattctggggctcatgatgccacctgcccattacgatgctaagcagctgaagaaagctatggagggagccggcacagatgaaaagactctcatagaaatcctggccacccggaccaatgctgaaatccgggccatcaacgaggcctacaaggaggattatcacaagtccctggaggatgccttgagctcagacacatctggccacttcagaaggattctcatttctctggccacaggaaatcgagaggaaggaggagaaaaccgggaccaggcccaggaagatgcccaggtggctgctgagatcttggaaatagcagacacccccagcggagacaaaacttccttggagacacgcttcatgaccgtcctgtgcacccgtagctatccccacctgcgcagagtcttccaggagttcatcaagaagaccaactatgacatagagcatgtcatcaagaaggagatgtctggggatgtcaaggacgcatttgtggccatcgttcagagtgtcaagaacaagcctctcttctttgctgataaactgtacaagtccatgaagggtgctggcacagatgagaagaccctcaccagggtgatggtgtctcggagtgagatagatctgctcaacatccggagggaattcattgagaaatatgacaagtctctacaccaagccattgagggtgacacctctggagacttcatgaaggctttgcttgctctgtgtggcggagaggactaaagctcctgacctcagagggccccctctaccaagcagtggcaactgcaccagctgccgccgtgacctgaccaagccattgctccagcttcaggatctaaggaagacgcaaggggtggggttggactgtccatccagctggggcactctctagccattgagggtcccaggcggtcccttctgttatccctcccgctcatggctaaggggctggtgaaccacggccatatactgcattcaactctgatccccttctacctactcctccgcccgccctggtttccatccctccacataaccctgcctgacttgagctttgtcacatctcaagacataccaaacctctgtctatg

SEQ ID NO: 296 - DNA, 1285 bp, Mus musculus
gaaagccaccgctaatttaaagcaaaaatggggaaggaaaagactcacatcaacatcgtctccggcaagtccaccacaaccggccacctgatctacaaatgtgatggaatcgacaagcgaacaatcgaaaagtttgagaaggaggctgctgaggctgactgtgctgtcccgattgttgctgctggtgttggtgaatttgaagctggtatctccaagaatgggcagacccacgagcatgctcttctggcttacaccctgggtgtgaaacagctgattgttggtgtcaacaaaatggattctaccgagccaccatacagtcagaagagatgtgaggagatcgttaaggaagtcagcacctgcattaagaaaattggctacaaccctgacccagtagcatttgtgccaatttctggtttggaatggtgacaacatgctggagccaagtgctaatatgccttggttcaagggatggaaagtcacctgcaaagatggcagtgccagtggcaccactctgctggaagctttggattgtatcctaccaccaacttgtccaactgacaagcctctgcgactgcccctccaggatgtctataaaattggaggcattggcactgtccctgtgggccgagtggagactggtgttctcaaacctggcatggtggttacctttgctccagtcaatgtaacaactgaaatcaagtctgttgaaatgcaccatgaagcattgagtgaagctcttcctggggacaatgtgggcttcaatgtaaagaacgtgtcggtcaaagatgttagagaggcattgttgctggtgacagcaaaaacgacccaccaatggaagcagctggcttcactgctcaggtgattatcctgaaccatccaggccaaatcagtactggctatgctcctgttcgtgacatgaggcaggcagttgctgtgggagtcatcaaagctgtggacaagaaggctgctggagctggcaaagtcaccgagtctgcccagaaagctcagaaggctaaatgaatattacccctaacacctgccaccccagtcttaatcagtggtggaagaacggcctcagaactgtttgtctcaattggccatttaagtttaatagcagaagactggttaatgataacagtgcatcgtaaaaccttcagaaggaaagaatgttttgtgaaccattttgtgtgtgtgtgtggcagttttaagttattggttttcaaaatcagtactttttaatggaaacaacttgaccaaaaatctgtcacagaattttgagaccatt

SEQ ID NO: 297 - DNA, 1035 bp, Mus musculus
acgtgttctcagctttccgcggcgcggcgctcgctctgtactgaccctccgagctcacacgctacctgccccgcagctcttcagcccggtcccggtgtcagaggcgagatcctgtggctaatttcagagtgataaaaatgaagagcctttaaaatgagttagctgcagggtgcgtggtgtacccctcggttccagcattcgtactggaaggagagaaccgcctccccagctgtcctcctgcctgcatgtacactaaggtaagaaatccagtctcactgaagacaagcagaaggcggggcacttgcttttccagagcagaaaagaaactgatgcatcagaaaaggtgactaataaacatactgaaagaatatggctgcacagataccggaatctgaccagataaaacagtttaaggagttcctgggaacctacaataaacttacagaaacctgctttttggactgtgttaaagacttcacaacaagagaggtgaaacctgaagaggtgacctgttcagaacattgcttacagaaatatttaaaaatgacacagaggatatccgtgagatttcaggaatatcacattcagcagaatgaagccctggcagccaaagcaggcctcctgggccagccacggtagagaggtcctgaggcggggacttgcactgaaagattgccagcagctgctgcagtcagaacaaggattcacatggtggagaatcccctgacacagcaggagccgtggtccaccatctgtcatgactacctgaccaatggaaaccaccagagaaaaacactgttcaccagaaagagtcaaaacagaaggccttcctgtgcggtaaaaatggtaagatgcggtggtgttgaggccttaagattcgtctgcgtggtcaccgtgattgcaaaaataaaccactgttcctttctttgtgactgttaattttaaagcaaaatatgtgtccaatcatgtatgagatagaaaaagtttattactaaaagtaaataaatgagtatcattgaaaaaaaaaaaaaaaaa

SEQ ID NO: 298 - DNA, 1111 bp, Mus musculus
ggaaagtttattgatactggtttctctttaccattctacaagcgtatgctaagtaaaaaacttactattaaggatttggaatctattgatactgaattttacaactctctaatctggataagagataacaatattgaagaatgtggcttagaaatgtacttttctgtagacatggagattctgggaaaagttacttcacatgatttaaagttgggaggttccaatatcctggtgacggaagaaaacaaagatgaatatattggtttaatgacagaatggcgtttttctcgaggagtacaagaacagaccaaagctttccttgatgggtttaatgaagttgttccccttcagtggctacagtactttgatgaaaaagaattggaggttatgctgtgtggcatgcaagaggttgacttggcagactggcagagaaatactgtttatcgacattatacaagaaacagcaagcaaattatttggttttggcagtttgtgaaagagactgataatgaagtacgaatgcgactcttgcagtttgtgactggaacctgtcgcttgcctctaggaggatttgctgagctcatgggaagtaatgggcctcaaaagttctgtattgaaaaagttggcaaagacacctggttaccaagaagccatacatgttttaatcgcttggatctaccaccatataagagttatgaacaactaaaggaaaaacttctttttgcaatagaagagacagagggatttggacaagaatgactgacttgtcttggagaagctcttgcatttaaatacccagccaagaaaaattgcacagatagtgtgtataagctgctcattctgtacagtgaattttctgaacctttcaaagtataaatgttttccgttcttccacagaaatatgcaaaacatttcatcattttctactttatttattgttccctttaaatgactgaccaggaaaaaaaaatcatccttaaattttgacgcaagcaagagaatttattaaaaagtatatatctatataaccatatatgacagtggctctagttttatagagcgccaggtgtattaaacatgacagccgttcattcacaaaaaaaaaaaaaaa

SEQ ID NO: 299 - DNA, 9909 bp, Mus musculus
cgggacgcggggaggagaaacttagcttttagtgtggcagggtcatgaagaggaggcggtggcgggagagcggaggaggcggagggggcgcaaaactgcggtagccagcgctggactggtggttgtggacgtgtgggagggtgagagtgtcagcctgcgggcagcggccggggctctgggctgagcgcggccgcggagccgccgctctcggccccctggctccgccatgttccgcagggcacgccttagcgtgaagccaaatgtcaggcctggtgtagggaccaggggctccgccgctcccaatccccagcgtggaccagaggctcccaggcctccggagcctgccaccgagtcagctccgaagccagcggagcccacagatgtgcctgcagtggattccgggggagcagaaccccaggaacaggctcccgggagcagtgatgaaaagactggtgacaaaaataatgctgcagagtccagcacattgtcctctgcttcttcacagagaagaaagcgagtgtcaagcacatccagtcttgttcagccttctggcagtgccccctcacagagtcgccccttatctacagttgatcacgatgcaccacagccaaaccctactccagctaaagagaagcagccgtgttcagacagataccgaatctataaggcccgaaaactgagggagatgttgaaagaggaactgagaaaggagaagaaacaatggaaaaacaaattttctacaaatgaaagccagaggccaccagatcgttcaaaaatgactatgagagacttcatatattaccttccagataacaatccaatgacttcttcagtggaacaagaaaagaaacctgagaaatccttggctcccaccccaacgagagataggcaagaaaatcagagcactcaagatgctaatgataatgaagacgtggaagaggaggtggatgatgggccacttctggttcctcgagtaaaagtggcagaagatggttctattattttagatgaagaaagtttaactgtagaagttttgagaacaaaaggcccctgcgtcgttgaagagaatgatcctatatttgagcgcggctccactactacttactccagcttcaggaagaactactactcaaagccatggtccaataaagaaaccgatatgttttttttagccatcagcatggtaggaactgacttttctatgattggacaactttttcctcacagagcaaggatagaaattaagaataaatttaaacgtgaagaaaaaacaaatggatggagaatagacaaagcattccaggaaaaacgcccttttgacttcgatttttttgctcatttgcttcagaaagttcttgctgaagaagaaaaaagaaaacaaaaatctactaaatgtcagagtttaaaggaaaaggcctccaaaccacggaaaaacttaaaagcaaaaacagtaaccagtgaagaagttaatgacgatccagatgagtctgtaaatagtaacatttcagatccagaaagatctcaaaatgatgctgagacagtcaatgaagaggaatcaccgagttcatcaggacagcacttagaacaagctatgttagagcaagaccaaaatcaagagaaaaagaggaggaggaaccaaggtgaagctaataaacaggaagcaacaaatcttttagagagggttcttgttcattcgagccctcctgcagcagaaatacacaagaatacatgtccttctgaggaaaatgaaagtgaatgcaataaagaacagataccatccttgacacagaacatagatgacattgcaggtttagcacccagtgaagagaccgagatgagaatggaccccatcccttccacatgtaatcaacaagacatcatgccactagcaagggagtcctcagagtcgtgtgctgtggctttacctgtgtgggaacccggtaatactgcctctgctgacatggctcatgctgagagctcctgctcagaaggaagaggtgctgacctgaagactgcggcaccagagactgaacagacagaaaatgtcaaaccaaaatcaagaagtcgactacagagacctaagcctaatctggcaagggcagttgggaagaaatcagctgtttcacaagacagacaagatgaaaggaacaagaactcaccttcagaaactgcagctgagaagaatcacatggaaaaagagaccatgaatgaatctgaaacatctgtagcaaagaatacagacggagagagcccaggtgccaaaactgtgtctgatttgagtgagaaatcctgtgtacagcaggatagtcaggcaaaggttttaagacctaccagactaatgaggagtcgaatgcaaagaccaaagccaaatgtagtgaaagctgcagaaaggaaagaaattctcacctcacaggaaaaatttggggcccatgtagagaaaagtgaagatgaatcctgtgttgtgattcctccacaaacggaaaatgagtcacataaaaacttgcaatgtgaagatactgtgtcagagcctggaagaaaggacccttttgagaatattcagcctgatcagccccaggttcttagtgactgcccaagtattcatgaaggtaataaagaaaacaaacggaaacaagtcccagttctaaggactagattccagaaaccaaaaccaaatacaggaagaagaagaagaagaatatcctccaaggaagggataccagaggagacacctatttctggagaaataccagcaacttgggaagaaattccgagtctggacacttctctgagggaggaggtactgagtgtacctcttgcccctcttactgctaccgcttccaccaaggactcagagtcagatgtgaaagacagtggcagaaatgatacagcttctaatgcggagatgtcagaaatgacagatgtcactatggaaatggagacaggtttggaaacaattggaagagatacttgcccaggggagatgggagcagaaatgattgacatccctatggaaacagaggcaggtttgaaagcatctttaaatgagacttcttgtatggagaaggtaccagagcttattgataccactggggaaatttgcacaaatttgggagaaactggaagaaaagaagtatttttacaggaaaatggcccgaaggaggtcggtccagttagtgaaccagagacaggtttgcaagaaactggaaaagatttggccatgaaagagagcacaccagacacgacagatagcactgaagaaagggaggcatattcagaagaaactgaaagacaagaaaaaatatctgcactgataaaggatgcagaggaggccaaagccaggggtgaaatggaaacccccctggaagagattggaggaggaacttcccagagaggaaaggcagcaggcgctcctgtggagcagtctgccagcgaggaggagccacagggcagcgcatgcagagaggaggtggcagtggagtcgagcactgcagaaggaaaggagctgaacctgagggaaactggagaagatgacgtctcctcgatggttgtggtcttaggagaaaagactgacattgaggaaacgaatggagatccgaaagaaacagaaagagagagttctgtctcttgggagagagggtctggagagatccaggtcggggaggaaatggtggaagacttaggaaaaccagaaaaaatagatgttgctccaagagaacgtgaaccagaggaacattcctcagggcagcctgaggcagatgtaattctgagcagtagtgacggcagcactggctctccacaggataaagtgaatattagcagtaaaatatcagtgatgcctacacttgtggaagaaaaagaaactactgacaaggacatatccagccacttaggtcatgtggagtcttgctcacagaatttgggacgccatgaaacagaccaagggatgccgcttccagatgctctagagcggttttcagatactaacttaagcaaacctcttcctcaagaacagcagccacttcaagttaaaccagctccctttctgagaagtcgattcaaaaaaccaaaaccaaacctgtcaagagcagctttaaagagagcaaccatagaagcagagcactgtgtgcctgggaagaaatccgaagcctgcaaagtggaggccgccatgctacagcaggacagtgaccaagctgctctctctcctcaacataatgtaccttccctgatggcatcaagagaaaatgataaatccggtcatgaggaggaggaggaggctgcgatactaccatgtacacagactgaaaaggatgcttcaccgccaaattcaagtgaacctaaagagggttctcagttaaccccaaaccaggaaaatggcttacttgttcctattgggactcccatgatgaatacggtcacacaagaaacaaggcaaaatgttgtccagacaactctcccagtgaggggtcgacttcagagaccaagaccaaatgtgcaaaaggccagacagaggcaaatagtagaaaaaggcgaagcgcgagacatagctaagaatgaaggaccagaactgcaaaaagacgagactagaacatgcctgactgtggcaaactcttctcacattgaaagtggagttgcagttgacatgtcctccagagtgtcagagtgccaagtgagtgaaagtcaaggccacgcagatcctgtagaaaacttaagtgttaataaagccagtgttgttcatgaacagatgaggcatgaaaataaaccgtatgttcctagtccagcactgctgataagaaggcggttccaaaaggctaaaccaaatttaggaggagcacgccgtaaggatgagcaaccaggtgtggagaaaggccggacagacgagagcacagcactaacagcagaagatcacctgctgcagaaggaagactgtgacacccagctttctctgcaagcaagggaaaaggcagatatgcctctggaggtttcagtgagaaaagagtgtatacattctgaagagtcgggttctgacagaaacgatgctcagccgaacgctggaccatcagaaggttccagggatgagactgcgaaagagcagcctacatctttggggcttgaagagcagagtcttagtaaacaaattagatccagctgtccacaactatggaaagaatcaagctatcccaagactgtttcgagtcgaagaacccctctctcttctgcctctgagtgtgaaatagagcacagttggaaaagaacacagaggaagacgaaaccaaatctgaccaaagggcgtggatcaaaacgaattcgaggtaagactgctaagaaggaacctagagcttccaagtccgtgttggtgactcttcgggcttctcagaaagaggatgaagatgatgctgaggattttgattctgactatgaggaagaaacctatcatcttgccccagaagaattaagcaaagcaccagtgtttgtacctgttggtctcagatcccctgaaccagtttctgctcagatcgaggaaacaatggaagagcttgagataaccatggacgttgcagacatgactgttgttgaacatcagctttcacatatggacacaacagctcaggctgtgcaagcagagaaagctgtgtatccgccatcatttgaaatggacgtaggtgaacagacccaagaagagccaggtcccagtgatggaagcacggaagccgccataactttacttacaatgggagatatagtattgcagtcagagatcattcctggacagggggatgtaggagtatgtgtattccctgatgttcattcagaggataaaagtcatgctccttttagcccagataatgtaaatcaaaaagttgtccatgactatccggaggtttgttcacctgtcattagtacatcgcatgcatcatttgaagaaaacaggattgtatcaaaggaacaaagcaatagagacgctgctgtggaggaagaagcagtggaggagaccttgccaaccaggaatacaacttctacgatgagcacacatttaagaatggagagtatggttgttacacctgaactaaattctgagaagactttagagatcagtgagtctcatggtcatcaggaagttgccagtttctgcataactaaagagacagaagtggaaattcaaagagaaactgaaggagatgattccaaagcagtagaattagaagataaaagccatgcaccagtcacagcagcagaaactaaggaagaggagcagtcgcagtgtgtgggtgatgttgaaggggccagtgtttctcaagaagcaatcctacctgcgagaattgaagatcatgaggagaccttgcaagaggttcaagagtcgggtactgcagttgcttcttctgagatagggcagcagacactcgattcgggtcagagttttggtgagagtgctgctaaagaagccctcaaagaaacccctaaaggcagcgacgtgcccgtgcttcatgggccagagagtgtaccatctcatattccagaagcccaacaagaaaacaccggtcctcaagctgttacagtgaatccatttgctgatggacagcaagatggagaagatgaacaagccttcattttaactctggtggaaatcccaacccatgcaacagaaggattcactgacgctgccatgcagttaatgccgagctctctgctgccagcacctatattggtcaggtctgggaatgcagcagaacgaggtgacctgagtgggagtttacaaacctctttggttgttcaagatgctccatccttatctccttctagaagtggcagttctgaaaagcctcctgctaatttggatcttacatctaggaagagattttgttgcagtcctgatgaaagtattcatgttcctcctgccaaaaagtcctcacttgttccaggaattgattatcaagaatgtacctctgaggtatgttcagaggaattaaatgtttttgagaaaacagcagagtcttgcatgggacaaggcattttccctacctcagagagcacacatgcaacctcaaaacctcagaaggaacacagtgagccaactgatacaggatcatctggatctcttgatgaaatcaaagatgcgtgtgtagaaaacatggctcaattgcctcagagtgagatagtatctgataaagaagagaaaactgaacctgcttccaattctgaacagagagacatcgtgacatcctcttcaaaaccccctctgaccagacctggcagaaggcctttgggatttttatcattactgtgtccaaaaaatagtttggaatctgatgaagtgactcaaacccatagtaagaagcgcctaaaacctcagatacctgtatcacggcgaaatttgagaaaacctaatctgcataatacaagccagaaaaaaaatcaagactcttcagccccacccccatcacccagcgttactgcgcctctgtctggcactgctgggagtcctgagagttcagcagctcaggtttcttctgatcagcccttgctaaaagaagagtgtaaaaatgggcccaaaggagcacctgaggaagaggtgaccccagtctcagagtttgtcttcagtgacatcttcattgaagtggatgagacactataaagctctctcctggggccccttctttttactttctacttttgtaatgagtttgagatttccagcgaccctgactttcaccaagcagaaaagcaccactgtctgttttgatttaggtcaattttgaatatttattgagcttcatttgaagcttttataatcagtgggaaacatttctttctgattgaccctgcatttggaaatatcaagcaattaagactggtctcactgacaggcattgtagcttgtttacatttgatgtcctctgtgctgagcgcacctggacttgagaactgtgtgcacgcacatctgtataaatcgtagtgctggcacactgggagcttgattgtgcttaacatttgctgcccttcttttctaaaggtggctgtgttttgtttctgtattttgttttgttttttattttgtttttttctttctttcatttttctttttcttgagggtgatcagttgcctgtaacaatatgaaagcaaagtgtgaaactccactttggtatggtaaagttaaaacttttctatcatcatctatttgactgaaaaaaaaaatgtatatttttctaattcatggtgatgtaacattagtcctgattgaagatctagtatttaaacttgctatttataaagtcggcacatcaaagagatttatttttaaattttttatttaaaatatatcccaatttaattattttcactcatcaaatttgggtaaagaaagcattaacaaataatttgtctccttttcctctttactttaaaagctattttaaaatgtcataattaaaaatgtttagtgttcatattttgaatacttttctcacactttaatatactgaatttgtactgtgaatattttttgcttttcttattctaatctcaggattttcattggaagaaaaaaattaacataaaggacaaattgtcttgtataattgatcttttttacacacacacacacccttaaaaaaaggtttagtgatagctattttccctactaaattctgttcacaggacatgtgggctttcagccacagaacatgaatctgatgttaaagcagaaaataaggcagccagtgaggtcctcattatgaacttgggtgtttttaattttgagtctttatgatttatgtgtcttgttttccctaacagtttttcccctggttcaaattaaatgcttccaagagcaaatgtattcaactttattataaaaccttatagattgatacatagaagtttttccataaaagattctttttgaactgtgtagcccaagtggtcctggtagcagctgcttaggcaggatgtgcctaagattcaaaaactgttcagtgtattaggaaatgagcaatacttcagttggaaaatatttttacatctaggtaatttttgtttttcatattgataaaatggtgaccacttttcaagtttctaagcaaacaagggtcgaactcaatgagtctagagtgctgattcattgaacttactgtgagcctgtttcctgttctgtggcttagagtcaaatgtatagtttaatgtctgctataaagggagatctataagttagatggaaattctcaaaagtatgcatctatttcatgtgactaatgtcacaaaatcatggaggtaattcacattgctatataaatgcctttttgttagtttttaaaatgtcatgttctgtaaagtttgtttgtttgtttttgtaaatgttacttgggttagatcaccgagactaaactattatttatccctgtataatatttatttttttaacctctgtctcatttatctgtaataaactgattttatggaagatgtaatttattgtataaagactacaggggcatttgttgtatagagaatcatgtcggtcaacaaattgtcctgctgccactggacaaaccggtgctaggaagagaaatacaatcagtgtgcttagctttaaggtgggaagatttgtgatggtggaaagatgttgcaaggaatttgttatagaaatcttcaaggagatgtatgaaagggctttaccttctcttgactgttttcctctgatcaattacatcttagcaggtggcccaggcaagacatagatgcaaatattaatacccagtgtttaccaccattattcaaatgcaagtgaccatgtttaatatcttgcttgaagtttttgacaaagaagcaatatcttgtcatttgtaaattttcttgttctaaagaaagcagtaatgttctgtagataaaaattatgtaaataaaagttattttat

SEQ ID NO: 300 - DNA, 3111 bp, Mus musculus
cggacgcgtggggccgccgccatcgtcggcgcgcttccctgttcacctctgactctgagaatccgtcgccatccgccaccatggtgaacttcacagtagatcagatccgtgccatcatggacaagaaagccaacatccggaacatgtcagtcatcgcccatgtggaccacggcaagtccacgctgaccgactcccttgtgtgcaaggctggcatcattgcctctgcccgagctggggagacgcgcttcactgacactcgcaaggatgagcaggagcgctgcatcacaatcaaatccaccgccatctccctcttctacgagctctctgagaacgacctgaacttcattaagcagagcaaggatggctcgggcttcctcatcaacctcatcgactctccaggccatgtggacttctcttcagaggtgacagctgccttgcgtgtcaccgatggagctctggtggtggtggactgtgtgtctggcgtgtgtgtgcagacagaaactgtgctgcgccaggccatcgctgaacgcatcaagcccgtcctgatgatgaacaagatggaccgggccctgctggagctgcagctggagcccgaggagctctaccagaccttccagcgcatcgtggagaacgtcaacgtcatcatctctacctacggcgagggcgagagtgggcccatgggcaatatcatgattgaccccgtcctgggcaccgtaggctttggttctggcctgcatggctgggccttcaccctgaagcagtttgcggagatgtatgtggccaagtttgcagccaagggtgagggccagctgagcgcagccgagcgtgccaagaaagtagaggacatgatgaagaagctgtggggagaccggtactttgatccggccaatggcaagttcagtaagtcagccaatagcccagatgggaaaaaacttccccgcaccttctgccagctcatcctggaccccatcttcaaggtgttcgacgccatcatgaacttcaggaaggaggagacagccaagctgatcgagaagctggacatcaagctggacagcgaggacaaagacaaggagggcaagccattgctcaaggctgtgatgcgccgctggctgcctgcaggggacgccctcctgcagatgatcaccatccacttaccatcccccgtcactgcacagaagtaccgttgtgagctgctatacgaggggcctcccgacgatgaggccgccatgggtattaagagctgcgaccccaaaggcccacttatgatgtacatttccaagatggtgccaacctctgacaaaggccgcttctatgcctttggtagagtgttctctggggtggtgtccacgggcctgaaggtccggatcatgggccccaactacacgcctgggaagaaagaggacctatacctgaagcctatccagagaaccattctgatgatgggccgctacgtggagccgattgaggacgtgccatgtggaaacattgtggggctggtcggagtggaccagttccttgtgaagacggggaccatcactacctttgagcacgctcacaacatgcgcgtgatgaagttcagcgtcagccctgtcgtccgtgtggcagtggaggccaagaacccagctgacctgcccaagctggtggaggggctgaagcggctggctaagtctgaccctatggtgcagtgcatcattgaggagtctggagaacatattattgctggcgccggtgagctgcacctggagatctgccttaaggacctggaggaggaccatgcctgcatccccatcaagaaatctgaccctgttgtgtcatatcgggagacagtcagtgaggaatccaacgtgctgtgtctgtccaagtcccccaataagcacaaccggctgtacatgaaggccaggcccttccctgatggcctggcagaggacatcgataagggtgaggtgtctgcccgccaggagctcaaggcacgtgcccgctacctggccgaaaagtatgagtgggacgttgctgaagcccgcaagatctggtgctttggccctgatggcactggccccaacattctcaccgacatcaccaagggtgtgcagtacctgaatgagatcaaggacagtgtggtggctggcttccagtgggctactaaggagggcgctctctgtgaggaaaacatgcgtggtgtgcggtttgatgttcatgatgtgaccctgcatgctgatgccattcaccggggaggtggccagatcatccccacagcacgccgctgcctgtatgccagtgtgctgaccgcacagccccgcctcatggagcctatctatctggtggagatccagtgtcctgagcaagtggtgggtggcatctacggtgtcctgaacaggaagcgtggccatgtgtttgaggagtcccaggtggctggtacccccatgtttgtggtcaaggcatacctgcctgtcaatgagtcctttggcttcaccgctgatctgcgatccaacaccggcggccaggccttcccccagtgcgtgtttgaccactggcagatcctgcctggggatccttttgacaacagcagccgccccagccaagtggtagctgagacgcgcaagcgcaagggcctgaaagagggcatcccagcgctggacaacttcctggacaaactgtaggcagcctgatactgccacatgctgcacagtgcccacccatcagaagacaccttgagactgtcccacagtgctcctctagaggctgctggggccaccctgacatcactcagcactcacttgctaccaattctatttatttcggaattacaagatagcgggaatctctctgcaggctggactggcaggctgtggggtgggcgggacacggctcttaacattttcagagggaaacgcgcagatgtccaaaagtctaaataaatgcattcagaggtttttggggtccatggccaagtggagttcccccagagggggaggtggggtaagtgcctccaggaaggcaggcagcctgccttagacttgcagcccggctgtgggaatgaatcattggagtaataaactacagtggttgatccaaaaaaaaaaaaaaaaaaaaaaaaaaaaaaaaaaaaaaaaa

SEQ ID NO: 301 - DNA, 2674 bp, Mus musculus
ggtctttcctcataaagcttcaagtttggacccacggtcgaagttgcatccctaaaggcaggctctctcactgggctgcaaccaatagcccgcagccatgagttccgacgccgagatggccgttttcggggaggctgctccttacctccggaagtctgaaaaggagcgaatcgaggctcagaacaagccttttgacgccaagtcatcggtgtttgtggtggatgctaaggagtcttttgtaaaagcaacggtgcagagcagggaaggggggaaggtgacagccaagaccgaaggcggaactactgtaacagtaaaagatgatcaggtctaccccatgaaccctcccaagtacgacaagatcgaggacatggccatgatgacccacctgcatgagcccgctgtgctgtacaacctcaaagagcgttatgcagcctggatgatctacacctactcgggcctgttctgcgtcactgtcaacccctacaagtggctgccagtgtataacgcagaggtggtggcagcctacagaggcaaaaagcgccaggaggccccaccccacatcttctccatctctgacaatgcctaccagttcatgctgacagatcgggagaaccagtctattttgatcaccggagaatccggggccgggaagactgtgaacacgaaacgtgtcatccagtactttgcaacaattgcagtcactggggagaaaaagaaggaggaggcaacttctggcaaaatgcaggggacgctggaggaccaaatcatcagcgccaaccccctgctggaggcctttgggaacgccaagaccgtgaggaatgacaactcttcccgctttggtaagttcatcaggatccactttggtaccacagggaaactggcttctgctgatattgaaacatatcttctggagaagtctagagtcactttccagctaaaagctgagagaagctaccacattttttaccagattatgtctaacaagaagccggatctaatcgaaatgctcctgatcaccaccaacccatacgactacgcctttgtcagtcagggggagatcacggtgcccagcattgatgaccaagaagagttgatggccacagatagtgccattgatattctgggcttcacttctgatgaaagagtctccatctataagctcacaggggctgtgatgcattatgggaacatgaaattcaagcagaagcaacgagaggagcaggctgagccagacggcaccgaagttgctgacaaggctacctatctccaaaatctgaactctgctgacctgctcaaagccctgtgttaccccagggtcaaggtcggcaatgagtatgtcaccaaaggccagactgtgcagcaggtgtacaactcagtaggcgccctagccaaagccgtctatgagaagatgttcctgtggatggtcacccgcatcaaccagcagctggacaccaagcagccccggcagtacttcatcggggtcttggacatcgctggctttgagatctttgatttcaacagcctggagcagctgtgcatcaacttcaccaacgagaaactgcaacagttcttcaaccaccacatgttcgtgctggagcaggaggagtacaagaaggagggcatcgagtgggagttcattgactttgggatggacctggcggcctgcatcgagctcatcgagaagccgatgggcatcttctccatcctggaagaggagtgcatgttccctaaggcgacagacacctccttcaagaacaagctgtatgagcagcatcttggaaagtccaacaacttccaaaagcccaaacctgccaaaggcaaggttgaagctcacttctccctggtgcactatgcgggcactgtggactacaacatcgctggctggctggacaagaacaaggaccccctgaatgagactgtggtggggctgtaccagaagtcttcaatgaagactctggcttacctcttctctggggcagcagcagctgcggaagcagagtctggtggcggtggtggaaagaaaggggccaagaagaagggttcctccttccagaccgtgtcagccctcttcagggagaatctgaataagctaatgaccaatctgaggagcactcacccccactttgtacggtgcatcatccccaatgaaaccaagactcctggtgccatggagcacgaactggtcctgcaccagctgaggtgtaacggggtgctggagggcatccgcatctgcaggaagggcttccccagcaggatcctctatgcagacttcaagcagagatataaggttttaaatgcaagtgccatccctgagggacagttcatcgatagcaagaaggcttctgagaagctcctgggatccattgatattgaccacactcagtataagtttggtcacaccaaggtctttttcaaagctggtcttctggggctcctagaggagatgagagatgacaagttggcccagcttataacccggacccaggctatgtgcagagggtacttggcgagagtggagtaccagaagatggtggagagaagagagtccatcttctgcatccagtacaacgtccgcgccttcatgaatgtgaaacactggccctggatgaagctgtatttcaagatcaaacctctcttgaagagcgcagagaccgagaaggagatggccaacatg

SEQ ID NO: 302 - DNA, 1566 bp, Mus musculus
aaaaaaaatggaattgtaagctttaattactttagtttttttttcttttgttttgttttcttttcccttctatagtgagttggatgtgtatcagttgataatgatagactgacatttctgatagttatttttctgtaataagcatggaaatgaactttatagttacatatatacatactgtggtgtcctaagtgcttaggggctgtttgtaaagtgaagagaaaaaaaaaaaaaaccaaaaacaccaacccccatcaaactattaaggtctttctataagtattctttttcgttataattcccaagcatgcagagatttatcataacttgctaaaaagtgacagctgtgagcacatgctgcagcagccccttcgttatcatctcagaagcagtccatcaaatcctgacagatgttaatgtcaaaaggagaacgtatccaaacgtttgtagttgaagggctatggacatgctgtcaaaattaattttctaggaaaacctttaaaaataagtactacctataggctgaaatatttccatgttacttctacagttgtagacataggcttacttgtcgagtggcatgctccactgactgccacatctagtcttgaaaagaggtggtactgacccacaggaagcaggcagttatgtatctcttagtgatgctcttgcaatgtttgcaatggtaagtgcacactattttgcacactcagatgtaagcaaaccccgatgtttctgtattgtgttatcgtctcctaggattgtaaaactagctactggtatggccatgagtgatgtggtcattggtgatgaaaaactacttctgtttttttcagtttacaaatgcagaacagagaagcttgcttgaacttgaaagtgtatactctgccactgcagtctcaatatgtaatccgtttcttactgggaatctagaccatgctttttcctttaaactgtcttttcatcacctttacgtaatcaaatttgacttacagtggaaaccaagatagttgtttttgcgaaacaatcttttagtaagactgagggaccatgtcagcaactatcttaaatcttcagttatagctggcatttccacacagacatgcaagaccctgacaaaggaaggggtaataatataagactatagaaatctgtgtttcagtttcatctcttttatttctaaagaataattacaggtaacttgatcttttaatgtaccatctcctatttatttattgttttctttctgaggtattaaaatatctagactgaattttgccaaatgtaagagggagaaagttcctgaagactctgactacttgcttatttttgattgaccttctatgcttatgtcattagtgcctcacaacgtgtttgatgtcctttattgatacaaagtgagcctgtgccttcattttcttgcccattttggtaccaatgtaaatttgtgttagaaaatcttgaaactctgtgagtctgggaagaatatatctgaatcctattcaatacatttgctggatgtgaagaaaaatacagccacatatttataaaacagttgttaccagt

SEQ ID NO: 303 - DNA, 9021 bp, Mus musculus
atggaagagaaacagcaaatcatattggccactcaagatggagggacagtgacaggaggagcacctaccttctttgtcatcctaaagcagccaggaaatggcaaaactgatcaaggaattttagttactaatcgagatgcccgtgctttgttgagtagggagtcatcaccaggaaaatctaaagagaaaatttgccttccggctgattgtactgtgggaaaaatcactgttacccttgataacaatagtatgtggaatgagttccataatcgaagcacagagatgattctgaccaaacagggaagacgcatgtttccttattgtcgatattggataacaggcttagattcaaatttaaagtatatccttgtaatggacatatctcctgtggatagtcatcggtataagtggaatggtcgttggtgggaacccagtgggaaggctgaaccccatattttggggagagttttcattcatccagaatctccttctacaggtcattattggatgcatcaaccagtgtctttctataaactcaaacttactaacaatacactggaccaggaaggacatattatcttgcactctatgcatcggtatctgccaaggcttcatttggtgccagcagaaaaggctacagaagtgataccgttaaatggccccggtgttcatacttttacttttccccagactgaattctttgcagtaaccgcttatcagaacattcagattactcagttgaaaatagattacaatccttttgccaaaggctttcgggatgatgggttgagcagtaagcctcagagagaaggaaaacagaggaatagctccgatcaagaagggaatagtgtttctagttctcctgctcatcgtgttcgtcttacagaaggtgaagggtcagagatacattcaggtgattttgatcctgtgttaaggggtcatgaagcatcaagcttaagtttagagaaggctccccataatgtaaaacaagacttccttggatttatgaatactgattcgacccctgaagttcctccgttgaaacctgagatttctgaaagtcgtattgtgaaccgttttgaagatgattcccagatttcctccccatcaaacccgaatggaaactttaatgtcgtcattaaagaagagcctctagatgattatgattatgaacttggtgaatgcccagaagggataaccgtgaaaccagaagagaccgatgaggaaacggatgtatactcaaacagcgatgacgatcctatactagagaaacaactaaagaggcacaataaagttgataatttagaagctgaccatccatcttataaatggctaccaaatagcccaggtgttgctaaagctaaaatgtttaaattagatgctgggaaaatgccagtagtttacttggagccctgtgctgtcacgaaaagcacagtgaaaatttctgaattgcctgataatatgctctccacttctcgaaaagataaatctatgttagcagaattagaatatttgcctgcgtatattgaaaattctgatgggactgacttttgcttaagcaaggattcagaaaatagtctcagaaaacattcaccagatctcagaattgtacaaaaatatactttacttaaagagcctaattggaaatacccggacatacttgacaacagtagcacggaaagaatacatgacagttcaaaaggatcaactgcagagtcattttcaggaaaagaggacttaggcaaaaagcgaacaacaatgcttaaaatggcaataccatcaaagaccgtgactgctagtcatagtgcctctccaaatactcctgggaaaagaggaagaccgagaaagttgagactctctaaggcagggcgaccacctaaaaacacagggaaatctttacctgctgccaagaatattcctgtaggccctggaagcacctttcctgatgtgaaacctgatctagaagatgtggatggggtgctctttgtctcctttgactcaaaggaggctcttgatattcatgcagttgatgggacaacagaagaaccttctagtcttcagaccacaaccacaaatgattcaggttgcagaacaagaatttcccagttggaaaaggaattaatagaagatttgaagtctttgaggcataagcaggtgatacatcctgctcttcaagaagtgggcttaaaactgaattcagtggatccaacagtgagcattgatcttaaatacttgggagtacaattgcctttgggtccagccaccagccttcccctatggaatgttacaggtaccaaccctgcctcacctgatgctgggttcccttttgtttctaggacggggaagaccaatgactttaccaaaatcaagggatggagaggaaaatttcaaaatgcttctgcatctaggaatgaaggtggaaattcagaggcttcactgaaaaaccgctctgctttctgtagtgataagctagatgagtacttggaaaatgaaggcaaattgatggaaacaaacataggtttctcttcagatgctcccacatctccagtagtgtaccagctacccaccaagagtaccagctatgttcgaactcttgatagtgtactaaagaagcaatgtaccatttccccttctacctctcactctgtgaagcctcagtctgtaaccactgcctctcgaaaaacaaaggctcagaacaaacagacagcactcagtggccgaactaaatcatcttataagtctattttaccataccctgtttcaccaaagcagaaaaactctcatgtgagccaaggagataaaattaccaagaattccttgagttcgacctcagataatcaggtgactaacttggttgtgccatctgtagatgaaaatgcatttccaaagcagattagtttgaggcaggcccagcagcagcaccttcagcagcaaggaactcgccctccaggcttgtcgaaatctcaagtaaagcttatggacctggaagactgtgcactctgggaaggaaaaccaaggacctatattactgaagagcgagcagatgtctccttgacaactctgcttactgctcaggcatctctcaaaactaaacctatccacacaatcataaggaaacgagctcctccatgcaacaatgacttctgtcgcctgggttgtgtgtgctctagtctagctttggacaagcgccaacctgctcactgccgtcgaccagactgcatgtttggttgcacttgtttgaaaagaaaagttgtgttggttaaagggggatctaaaacaaagcatttccataagaaggctgctaatcgagatccattattttatgatacgctgggagaggaaggaagggaaggaggaggagtcagagaagatgaggaacaattgaaggagaaaaagaagagaaagaagctcgaatacactgtatgtgaagcagaacctgagcagccggttcgacattacccactgtgggtgaaagtagaaggtgaagtagatccagagccggtttatattccaactccttctgtcattgaacctataaaaccattggtgttgcctcagccggatttatcttctactactacgaagggcaaactaacccctggaattaaaccagcacgaacatatactcccaagcccaatcctgtgatacgagaagaggacaaagatccagtctatttgtactttgaaagtatgatgacttgtgcccgagttcgagtatatgaacgaaagaaagaggaacagagacaactgtctccacccctgtctccatcctcatcatttcagcagcagagttcctgttactctagtcctgagaaccgtgttacaaaggaacttgattctgaacagaccttaaagcagctcatttgtgacttggaggatgattctgataaatcacaagaaaagagctggaaatcctcctgcaatgaaggagagtcctcttctacctcgtatgtacatcagaggtcacctggtggtcctaccaaattgatagagatcatctcagactgcaactgggaagaagatcgaaacaagatcttgagcattttatctcagcacatcaatagcaacatgccacagtcacttaaggtgggcagcttcatcattgagttggcttctcagcggaagtgtcggggtgagaagacccctcctgtttattcttctcgtgtgaaaatctctatgccatcaagtcaagaccaagatgatatggctgagaaatctggatcagagactcctgatggtccattgtcccctgggaaaatggatgatatctctcctgtgcagacagatgccctggattcagtgagggagagattacatggaggcaaaggtctacctttttatgcagggctttctccttcggggaagcttgtggcctataaacgtaaacccagttcaactacatctgggcttatccaggtagcatccaatgccaaggtggctgcatccaggaaaccacgcaccctgttgccttcaacatccaattccaaaatggcatcctctggcccagcaacaaatcgctctgggaagaatctgaaggcatttgttccagcaaaaaggccaattgcagcgcggccctctcctggtggtgtgttcacacagtttgtgatgagcaaagttggtgccttacagcagaagatacccggagttcgcacacctcaaccccttacagggccacagaagttcagtatcaggccttctccagtaatggtcgtcacacctgtggtttcttctgagcaagttcaggtgtgcagcactgtagctgctgctgtcactacttcccttcaagtgtttctagaaaatgttactgctgtgccatctctgactgctaattctgatatgggagctaaagaagctacatattcttctagtgcctccactgctggggttgttgagatctctgaaactaataacactacccttgtaacatctacccagtctacagccactgtgaaccttaccaaaactactgggataactactagccctgtggcttcagtttcatttgctaaaccattggtagcatctccaaccataactcttcctgttgcttccactgcctccacctccatagtcatggtgaccacagctgcatcttcctccgtggtgaccacacctacttcatcactgagttctgtacctattatactctcaggaattaatggaagtccacccgtgagccagagaccagaaaatgcccctcaaattccagtgactactccacagatctcttctaacaacgtgaaacgtactggacctcgattcgacgtcgggcccaatgggcagattgtccaattcctacctttacatcagattcgaggctctaatgcccagcccagcttacagcctgtggtatttcggaacccaggatctatggtgggaatccgactaccagctccttgcaaatcttcagagactccatcatcttctgcttcatcctctgccttctctgtcatgagtcctgtgattcaggctgtggggtctcctccaacagtaaatgtcatttctcaggcaccttcactgctttcctctggatctagtttggtctctcaggctggtacactaactctgaggatctctcctcctgaaactcaaaaccttgcaagtaaaacaggctctgaaagcaaaataacacccagcactggaggacagcctgtaggcactgctagcctcattcctctgcagtcaggtagttttgccttgttgcagctcccaggacaaaagcctatccctagctctgttcttcagcatgttgcttcccttcaaataaaaaaggaatctcagagtacagaccagaaagatgaaacaaactctatcaaaagagaggaggaaactaagaaagctctaccatcaaaagataaagctctagactctgaggctaatataatgaagcaaaactcaggaattattgcctcagaaaatacctcgaataattcattggatgatgggggtgatcttttggatgaagaaacccttagggaagatgccagaccttatgaatactcttatagcactgggtctcatacagatgaagacaaagatggtgatgaggactctgggaacaagaatcagaacagtccaaaagaaaaacaaactgttccagaagctagagctggctctaaaaacattgatattatagcactccaaagcatcagaagtatacggcctcaaaagtgtgttaaggtgaaggttgaaccgcaggagggatcagacaatccagagaacccagatgactttctagtcctttctaaggacagtaaatttgaattatcggggaaccaagttaaggaacagcaatctaactcacaggcagaggccaagaaggattgtgaagattctctggggaaggacagtcttagagagagatggagaaaacacctaaagggccccttaactcagaagtacattggaatttcacagaactttaacaaagaggcaaacgttcagttctttacagaaatgaagccatgtcaagaaaattctgaacaggatatctctgaattacttggaaaaagtggaactattgagagtggtggagttctaaaaactgaggatggttcttggagtggcatttctagttctgcggccttctctattatccctaggagagctacaaaaggaagaagagggagcagacattttcagggtcatttactgctcccaagagaacagatgaaaccaaagcaacagacaaaggatgggagaagcagtgctgctgacttcacagttttggatctggaagatgaggatgaggaagatgagaaaactgatgattctcttgatgagattgtggatgttgtctctggctaccagagtgaggaggttgatgtagaaaagaataactatgtagactatcttgaggatgatgagcaggtggatgttgaaacaatagaagagctttcagaggaaattaactttccctacaagaagaccacagcaactcacacacagtccttcaaacagcagtgtcatagccatatctctgcagatgaaaaagcttctgaaaagagtcgaaaggtttcattaatttcttcaaaattgaaagatgattgctggggtgataaaccacacaaagaaacagaagcttttgcatattaccgacggacacacactgccaatgagcggcgtcggcgtggtgaaatgagagatctttttgaaaaattgaagattacattaggattacttcattcttccaaagtttccaaaagtctcattcttaatcgggcattcagtgaaattcaaggactaacagaccaggcagataaattgatagggcagaaaaatctcctgagtcgaaaacgaagtattttaatacggaaggtatcgtctctttcagggaagacagaagaagtggtcctgaagaagctagagtatatttatgcaaaacaacaagcactagaagcacaaaaaagaaaaaagaagctggggtcagatgagtttggtgtgtcccccagaattggcacacagctggagggatcttctgcatcatctgtagatcttggacagatgctcatgaataacaggagggggaaacctttgattctttccagaaaaagagaccaggctacagaaaatgcctcaccttctgacactccgcactcttctgccaacctggtaatgactccacaagggcagttgcttaccctaaaaggccccttattctcaggaccagtggtagcggtttctcctgctctcttagaaggtggtctgaagcctcaagttgcaagcagtactatgtctcagtctgagaatgatgacttatttatgatgccacgaattgtcaatgtgacatcattggctgcagaggaagatttgggaggtatgagtggcaacaaataccgtcacgaagttcctgatggcaagccacttgaccacctgagagacattgctgggagtgaagccagctccttaaaagataccgagagaatctcttccagaggaaaccatcgagatagcagaaaggcactgggtccaacacaggtgcttttggcaaataaagattctgggtttccacatgtagctgatgtttccactatgcaggcagcacaggaatttatacctaaaaatatgtctggtgatgtgagagggcatcggtataaatggaaggagtgtgagttgagaggagagagactaaagtcaaaggagtctcagtttcataaattaaagatgaaagatctgaaggactcaagcatagagatggaactgaggaaagtagcctcggctatcgaggaagcagccctccatcccagtgagctgctgactaacatggaagatgaggatgacactgatgagactctgacttcactgctcaatgaaattgcttttcttaatcaacagctaaatgatgactctggcctggctgaactgtcaggctctatggatacagaattctcaggagatgctcaggcgaggcttattatcagtaaacttgctcctgtgaacagatcagcataccaagttggacacatgggaacaggtgtgaaagagttgcctgatgtcctagaggagagtgaaaccatcagccccctcctcctccacttggaagatgatgacttttctgagaatgtgagacagcttggggacacagcctctgagccagatgtccataagattgttattgaccctgagataaaggattctcgtgtttcccataggaaatctagtgatggagggcagagtacttctggtctccccgcagagcctgaaagtgtatcttcacctcccatcttacacatgaagactggcccggagaacagcaacacagatactttgtggaggcctatgccaaagttgaccccattaggtttaaaagtagctaatccccccagtgatgccgatggtcagagtctcaaggtgatgcctgccttggcacctatagctgccaaagttgggtcaattggacacaaaatgaatttaacaggaagtgaccaggaaggccgggggagcaaggtgatgcctacattggcacctgttgtacctaaattgggcaactctggagctccattaagttcatcagggaaatga

SEQ ID NO: 304 - DNA, 8257 bp, Mus musculus
cgcgagctctggttggtggagccgaagtcacgaggacccccttcgtcgcctttccagaggcgattactgggcaggctcagtcttttgcctcagacgctagctgtagctggcaggcggttgtacgtgctccagagtcgtcggtacccgctactgcagtcgctttcgtgtggcttccgctgagctcttccgagctgctcgctctccacacgcgccgccgccgtaatccgccaccatggtgaagctcgcaaaggctggcaaaacccacggtgaggccaagaaaatggctcctcctccaaaggaggtggaagaggatagtgaagatgaagaaatgtcagaagatgaagatgacagcagtggagaagaggaggttgtcatccctcagaaaaaaggcaaaaaggctaccacaaccccagcaaagaaggtggttgtttcacaaacaaaaaaggctgcagttcccacaccagctaagaaagcagctgtgaccccaggcaaaaaggcagtagccacaccagctaagaaaaacattacaccagccaaagtcattccaacaccgggtaagaagggagctgcacaagcaaaagcgttggtaccaactcctggtaaaaagggagctgccactccagctaagggggctaagaacggtaagaatgccaagaaggaagacagtgatgaggatgaagatgaagaggatgaagatgatagcgatgaggatgaagatgatgaggaagaggatgagtttgagccaccaatagtaaaaggagtgaagccagcaaaagcagctcctgctgctcctgcctcagaggatgaggaagatgatgaggatgaagatgatgaggaagatgatgatgaagaggaggaagatgactctgaggaagaagttatggagatcacaacagccaaaggaaagaaaactcctgcaaaagttgttcctatgaaagccaagagtgtggctgaggaggaggatgatgaggaagaggatgaagatgacgaggatgaggatgatgaggaagaggatgacgaagatgatgatgaggaagaagaggaggaagaacctgttaaagcagcacctggaaaacggaagaaggagatgaccaagcagaaagaagcccctgaagccaagaaacagaaagtagaaggctcagaaccaactacacctttcaatctgttcattggaaaccttaatccaaacaagtctgttaatgaattaaaatttgccatcagtgaactttttgctaaaaatgatcttgctgttgtggatgtcagaactggtacaaataggaaatttggttatgtggactttgagtctgctgaagacctagaaaaggccttggagctcactggtttaaaagtgtttggcaatgaaattaaactagaaaaaccaaaaggaagagatagtaagaaagttcgagctgcaagaacacttctagccaaaaacctctctttcaacatcactgaggatgaattaaaggaagtgtttgaagacgccatggagatcagattagtcagccaggatgggaaaagtaaagggattgcttatattgaatttaagtctgaagctgatgcagagaaaaatttggaagaaaagcagggggcagaaattgatggacgatctgtttcactctactatactggagagaaaggtcaaaggcaagagagaactggaaagaccagcacttggagtggtgaatcaaagactttggttttaagtaacctttcctacagtgcaacaaaagaaactcttgaggaagtatttgagaaagcaacttttatcaaagtgccccagaacccacatggcaaacctaaagggtatgcatttatagaatttgcttcatttgaagatgctaaagaagctttaaattcctgtaataaaatggaaattgagggcagaacaatcaggctggagttgcaaggatccaattcgagaagtcaaccatccaaaactctgtttgtcaaaggtctgtctgaggataccactgaagagaccttaaaagaatcatttgagggctctgttcgtgcaagaatagtcactgatcgggaaactggttcttccaaagggtttggttttgtagactttaatagtgaggaagatgccaaagctgccaaggaggccatggaagatggagaaattgacggaaacaaagttaccttggactgggccaaacctaagggtgaaggtggctttggtggtcgaggtggaggcagaggaggtttcggaggcagaggtggaggcagaggtggaagaggtggatttggaggaagaggccggggaggctttggaggtagaggaggcttccgaggcggcagaggaggagggggagacttcaagccacaaggaaagaagacgaagtttgaatagttccttccatcccattctttccctcttcattttaaagaaaggactctggggtttttactctgttacctgttcaatgacagagccttctaaggacattccaagacagtaaagatcctaaactctgttgccagacttaatacttcctagaggttacatttggattgttgcttaagagcttggcaagaccaactctgcccagtgggaatttcagttgtgttcctactgctttcaagaattcccagctacaaatgtggaaattggtggggaacagcttcatcatgattctgatctggaagatttaatttgtatcttagaagggtgtgtactggaaaagtggttgatagagcacatggatcagtgctggaaataccatacaagagcttgtgtggtatgtaattctattcccagcataataagaacaaacagtacagtgcaatctgaaatgacctggacaaggaatggtaccccattgggttgaaaaattcacatagccaggatggttgcacatgcctttaaccccagcacttgggagggagaggctggtagatctgagtttgatctggtgtacagagagttccagaacagccagggctgtttattagagaaaaaaccctgtcttgaaaaaacaagaaaaaaaaacctcacagacaaccaaatacagagttttagccactgagtaccaagtctcagcagcaagctgggagtgacgtaatccaatcccatgggaggctaaagcagtctatgacttcaatgccagttgggtctgcagaactgagttgctggatagtgagggatacttagaaactttgtcttgaaaaaaaaaacaagacctgtcaaatttgagagaagctttgggaaacaaggtttgtaagttccaacagagggaacagtggcctttttgacttaaaggttgtcagaggtccagtttaactagggataatacagtggcccttggcctgtgtacttaatgaatttttcagtgatctatcaaggatgtttggtttttttgttttttgtttgttttgtataaggcatgggtgcctagataaccttaatagaaactttcctgtaggtgtttttccaagtcccactcccaacaaactgattttcaagaaagaccagtcagctattctcaaccaaagaccctctgtagggttgcgcttagcacctgtctggtggcttgagtatgtggtatgaccattgcagtcgcagtcctgtctaaaagtgaggatggcgtgggcattagatttgtgtagcagggaacagtttggtgggttcttttgctgtggggagtggagcccttgattatgttaacctccttgttaaagattaatggcatgtagctgaaggcactcagctgtcattaatcctagaaggcagaccaatttgaggctaaggaattccagaatagccagtgctacacagaagacccccaagactacaatagcaaaggaaaggttcaactctggtgctagcagacatcatttttttgtggattgaggacatagttaacctataggatcatcagaagatttacagttgaatagctctccctaaacgaggcagacattttagaaaagcagcaaacctttctggaaatggttgtttgctttcttttctcattcttccagcaggtggcaacatgagaactgaagaaagggtggagggaaggcagttaatctgccttcacctaatagataaacacaaagctcttattctggtggtagagtagcttgtagaggtcttttaaagagcaacaaagctttctcatttgaaagattcacttcagctgggcgtggtggcgcacgcctttagtcccagcacttgggaggcagaggcaagtgattttctgagtgagttcgaggccagcctaggtctacagagtgagttctaggacagccagggctacacagagaaaccctgcctcaaaaaacaaaaagattcactcctgaccatttatcacctgcttttgactatacactaccccttcagtgtggcttttttcctacggatgctagtgataggagttacctaatgtagttttcagttcaatctgcctgaaccttttcaactcttaaggaacataggcagatgctaagggtgtaggtcttgaccctatactgaggtagaaaggaaggggaaatggaagaggagcatgtactctttacttctaagctggatctatagccttaggattaccatctataacaggctaatttcattcagttagtggtaaaaccctttgccatagaataaaagggctctcaaggttctagtagtaaaacaagttttggttgctgtcctccattaagtgcctactaaatgataagtgatggagaggatggaactgattccaagaaatactcaacagtgaggacttataggccacttaacctgtgtgtgcttgtgggatatttctaccttttgaagcagggtctcttattttcttactcactacaagctttcaagtacttctggcaatacgaatgggattagcaatgcatgccatttcagtggccttatctgggtttcaggggtcctggtcatcaggttctcgctggtaaatcttaaagaccaccgtcttttttttttttttttttttgagacagggtctttagctctgtggccatcatggaactcaataggtagactaggctgacctcaagatgtctgcctcttgagtgttgcattaaaggcctgtgccaccatgtcaggctccattatagaaacacactactatcagaaggatgataggctgaggcccattttttaaccctttgaaaaaaattctggctgggcagtggtgacactgcctttaatcccagcacttgggagacaggcaggtggatttctgagttcaaggccagctgggtctatagagtaagttccaggacagccagagctatacagagaaacaaaaaaaaaacaagggtttattggggagggaagggaagtacttattttgaataaggttttattgtgtatccctgattgtctttgaaattaatttgcttcaactcgaagtgctgagactgcaagtatgtacaaccacagtactcttaggttctaactgaattctcacccattatttttcaaatacggcctttcagttttattctctactggactcttagataaccagatactggcattgaaactagtttttttctctttgaatattaatttggatacattctattgttttggattctagttcactgattcttctgttaggccctttagtgaagctttcaggtgtctttagtttttttttaatttgtgtgtgtgggtatagtgtctgtatttctccatgtgcatgcaatgccacaggaggccagaagagggtggatcttccaaccttttttttttttttaaagatttttattttatgtatatgagtacactgtagctgtcttcagacacaccagaagagggcatagaatcccattacagattattgagagccaccatgtgattactggggattgaactcatgacctctgaaagagcagtcagtgctctgaactactgagccatctcaccagccgccttcaagttcttgtgaaccaccatgtgggtactgtgaatcaaacttgtgttttctggactcttaacagctgagtcatctctctagcccttcaagtgtttcctttctcttctaggtttccagtttatgaagcccccattttgtcatttaaattcttttcctgcaaattcctatacatctacaatcattgaagtcatttgtaaatttttttatgtgcattagtatttggtctttatgtgtgtgaggagtcagacccaccatgttacaaacagttgtgagctgctatgtgggtgctgggaattgaacttgggtcccctggaagagtgaccagtgcccttaagtcgccccttatttgtagttttaacaggagttatggttgagtacttgttaggattatgaagagttgtttctctttcattgcatgtctaaactggacattgacccatatttagaggccagccatgtgctaattcaagtacattttgtactggcattcttaagtagctagcaaaatctgagtttctgtttttcatagaatatgatgagatttactttaaagccaggtaatgtgtttatcctgagaataccagctgtgtattttcttgagccaaccaaattgaaagtgaggagtttcagtgattaaacactggctgtttacatgcagagaaccccagttcacttcccagcatccagatgctgcttgactgtaactagttccagggacccaaggtccttttctgctttttgggcactttcttgggtgctagcaaaacacccatatacataaaaatgaataggaaaatgaaaaatttaggaaaagttggaagcgattttatgtcaaatttactgttcctgttcatggtcccccccaaacttccagactcactcctcagtacccctctgttgcccagaaatccggctaatcttggcacacctgtagcgcgccagactaaacactgactttgagagtatgtgcctcagttctatctggtaattatttttatggtgcttggaattagaccaggaccttggtttgtacatataattaggtgattgcagtttttcttgactttggtttttttgtttttttcctttacatttctgtcagatttctgtttttttgagacagggtctctctcactatgtagctttggttatcctagaacttactatttagaccagctggcctttaattcccagaggttcattcacctctgccttctgagtgctggcatcaaagagagtggattcgtagctgttaatatcagctataaacttgatcagattgataagtgtctagggcactagggaattactctacatgttgctataacagaatacctgaccaaagcaatttaaagaaaaggggtttattttgattcacagttccagaatatagtccatcatggcagggacaaggacgacatgatgccagaagcttgaagcagctggtcacattgcatctatagttagaaaaagttgatggatgcttgtattcagctagctttcctttccatgcagactaggactccaacctagggatggttttacatacctgaggtaattcaagataatctcataggcatagccagaagttaacctgatctagataatttcctacagatatgcttagaagcgtgtctatttccttctagatccagttcagttgacaatgtggtttggcatactctagggtgtgtgtgtgagtatttccagaaaggactagctgaactacaaacactcaccctaagccatgaaatctggggcatggtggctgggatttgaactcaggacctttgctgagccatccaccagccccaagtttctctgtgtagccctggctgtcctggaactcactctgtagaccaggctcagagatctgcctgtttctgcctcccaagtgctgggattaaaggtgtgcgccgccaccgcctggtaaagcaattttgataatcttttgtctctattctatcataacactcccagtgtctaatcatttggaagggtgccatctctagtttcttttcccatatcaaagaaagtgcaaattttttaggggcatcataatggtaacttggacattaattaggaagaaactgcatttgttggttaaaaatatctgtaaagggggccagtgagttcaattagtaaaggtgcctgccaccaaacctgacagcctgtgtttgatctctagaagatgtaaaagctgaaggagagaaacaataggtttgtctggcctctctgtagcaagcatgtacctgaacatgcatatcactcatacagtaattaaacatcggaatgattcacatccacaaggtaaactatgggaaggataaacctctagtaaacatgtc

SEQ ID NO: 305 - DNA, 1560 bp, Mus musculus
atgacagaatcaactgctgtgtctgttcgttaccttgagcaacgtgggacagaaagatgccgtagaatcatcatctacttctggacccagctgtggtttaagatgctggagtttcggcaactgttgctggagcaaatgcatctctatgaggaagagaataaggtgagacactctgctctacagcagatcaatgtgggcaataactatttttcttcctggttgaaaaattggactgccgattgtgtttgcgatctgatgaaaacagctgaagaagctgcgacgcttagtcagatacctttaaggaggagacatagtttgattgtggacatcacggtgaaactggcaaaggcccgcaaaacccatggtgagtcaaagaaaatggctcctcccccaaaggaggtggaagaagatagtgaagatgaagaaatgtcagaagatgaagatgacagcagtggagaagaggagaggctaccacaacccgagcaaagaaggtggttgtttcacaaacaaaaacgggctgcagttcccacagcagctaagaaagcagctgtaaccccaggcgaaaaggcagcagccacacctgcaaagaaaaccgttacaccagccaaagtagttccaacacctgcagcccctggaaaacgggaaaaggagatgatcaaacagaaagaagcccctgaagccaagaaacaggaagtagaaggctcagaaccaactacacctttcagtctgttcaatggaaaccttaatccaaacaagtctgttgctgaactaaaagttgccatcagagaaattttgctaaaattgaccttgctcttgtggatgtcagaactggcacaaataggaaatctcgttatgtggactttgagtctgctgaagactcaaaaggccttggagctcactggtttaaaagtgtgtggcaatgaaattaaactagaaaaaacaaaaggaagagataaagtgtttgaagacgccatggagatcagattagtcagccaggatgggaaaaggaaaggcattgcttatattgaatttaagtctggggctgatgcagagaaaaacttggaagaaaagcagggggcagaaattgatggacgatgtgtttcactctactgtactggagagaaagaacaaggcaagagaaagctgggaagaatagcacttggagtggtgaatcggaaactggttttgagtaaccgttcctacagtgcaacgaaagaaactcttgaggaagtgtttgagaaagcaacttttatcagagtgccccagaacccacttgacaaacctaaaggatatgcatttatagaacttgcttcatttaaagatgataaagaagctttaaattcctgtaaaaaaatggaaattgagggcagaacaatcaggctggagttgcaaggacccaatgagagaagtcaaccatccaaaacgctgtttgtcaaagactttaatagtgaggaagatgccaaagctgccaaggaggccatggaagatgaagaaattgatggaaacaaggttaccttggactgggccaaacctaagggtgaaggtggctttggtggctga

SEQ ID NO: 306 - DNA, 3617 bp, Mus musculus
ttaatgcaagaggaactggaaaaccaagtcgtccttccaaacccaccgttgccatggatccaattgctccaccaggaaaaccacaaaatccaagagttacagatacaacaaggacttcagtctccctggcctggagtgttccggaagatgaaggtggatctaaagtcacagggtacttgatcgaaatgcaaaaagtagatcaacgtgaatggaccaaatgtaacaccaccccaaccaagattcgggagtataccctaacacacctacctcagggcgctgaatacagattccgtgtcctagcctgtaatgctggtggacctggagaacctgctgaggtaccaggaaccgtcaaagtcacagagatgctggaataccctgactatgaacttgatgagagataccaggaaggtgtctttgttcgacaaggtggggtcatcaggcttaccatcccaatcaaaggaaaaccattcccagtatgtaaatggaccaaggaaggccaagacattagtaagcgtgccatgattgcaacatcggaaacacatactgagcttgtgatcaaagaagcagacagaaacgattctggaacttacgacttggttctggaaaacaaatgtggcaagaagaccgtttacattaaggtcaaggtgataggaagtcccaacactccagaagggccactggaatacgatgacatacaagcccgctctgtaagggtcagctggagacctcctgctgacgatggtggtgctgacatcctgggctacatccttgagagaagagaggtacctaaggctgcctggtataccattgactccagagtccgaggcacatctctggtggtgaaaggcctcaaagaaaacgtggaataccatttccgtgtctcagcagaaaaccagtttggcataagcaaacccttgaaatctgaggagccagtcataccaaagacaccactgaatccaccagaaccaccaagcaatcctcctgaagtacttgatgtgaccaaaagttccgttagcttgtcatggtctcgacctaaagatgacggcggctctcgagtgacgggctactacattgagcgcaaggagacatccactgacaagtgggtcagacacaacaaaacccagataaccaccacgatgtacactgtcaccggcctcgttcccgatgctgagtaccagttccgcatcatcgcacagaatgacgttggccttagtgagaccagccctgcttctgaacctgttgtttgcaaagatccctttgataagccaagccaaccaggagaacttgagattctctcgatatccaaagacagtgtcaccctccagtgggagaaacccgaatgtgatggtggcaaagaaatccttggatactgggttgaatacagacagtctggagacagtgcttggaagaagagcaataaggaacggatcaaggacagacagttcaccatcggcggtttgctagaagctactgaatatgagttccgagtatttgctgagaacgagactgggctcagccgaccacgtagaacagctatgtctgtcaagactaaactaacatctggagaagccccaggagtgcgcaaagaaatggctgatgtgaccaccaaattaggtgaagctgcacaactctcatgccagatagttggaaggccccttcctgacattaaatggtaccggtttggtaaagagctcatacaaagccggaagtacaaaatgtcctcagatgggcgcacgcatactctgacagtaatgacagatgaacaagaagatgaaggtgtttatacatgtgtagccacaaatgaagtaggagaagtagaaagcagcagcaagcttcttctgcaagcggcaccacagttccatcctggttacccactgaaagagaagtattacggggccgtggggtctacgcttcggctccacgttatgtatattggccgcccagtacctgccatgacttggttccatggccagaaacttttgcaaaactcagaaaaaatcaccattgaaaacactgagcactatactcaccttgtcatgaagaatgtccaacgaaagactcatgctgggaaatacaaggttcagctcagcaatgcctttgggacagtggatgccaccctagatgtggaaatacaagataaaccagacaagcctactggacccattgtgattgaagcactactcaagaactcggtggtgatcagctggaaaccacctgctgatgatggcggctcctggatcaccaattacgtggtagagaaatgtgaggccaaagaaggtgctgaatggcaattggtgtcttcagccatctcggtgacaacctgcagaattgtgaacctcacagagaatgccggctactatttccgggtctcagctcagaacacctttggcatcagtgagccactagaggtcgcctccattgtgatcatcaagagtccattcgaaaagccaggtgttcctggtaaaccaaccatcactgctgtcacaaaggattcttgtgttgtggcttggaagccacctgcaagcgatggcggtgcaaagatcagaaattactaccttgagaggcgcgagaagaagcaaaacaagtggattgctgtgacgacagaggaaattcgagaaaccgtcttctcagtgcaaaaccttattgaaggtcttgaatatgagttccgtgtgaaatgtgaaaacctgggtggagagagtgaatggagtgaaatatcagaacccgtcactccaaaatccgacgtcccgattcaggctccacacttcaaggaggagctgagaaacctgaatgtaaggtatcagagcaacgccactctggtctgcaaggtgaccggtcacccaaagcctattgtgaaatggtacagacaaggcaaagaaattatcgccgatggactcaagtacaggattcaagaatttaagggcggttaccaccagctcatcattgcaagcgtcacagatgatgatgccacggtgtaccaagtcagagccaccaaccaagggggctccgtgtctggcactgcttccttggaagtggaagttccagctaagatacacttgcccaagactctcgaaggcatgggagcggtccatgctctccgaggggaagtggttagcatcaagatccccttcagtggtaagccagaccccgtgatcacctggcagaaaggacaagatctcatcgacaataatggccactaccaagtgattgtcacaagatccttcacgtcacttgtcttctccaatggagtggagagaaaagatgctggcttctatgtcgtctgtgctaaaaacagatttggaattgatcaaaagacagtcgaactggatgtggctgatgtccccgacccacccaggggtgtcaaagttagtgacgtctcacgcgattctgtcaacttaacatggacagagccagcttctgatggtggtagcaaggtcaccaactacatcgtggaaaagtgtgcaactactgcagaaagatggctccgagtgggacaggcccgagaaacccgttacactgtgatcaacttgtttggaaaaacaagttaccagttccgagtaatagctgaaaataaatttggcctgagcaagccatcagagccctcagaaccaaccgttacc

SEQ ID NO: 307 - DNA, 3542 bp, Mus musculus
gttatgggcatgttcaactgcctccacggcaataatatgtcaggacaacacgatatcccccctgaagtcggggagcagcccgagcaagaacctttggaagccccaggggcagctgcccccggtgctggggctggcccagccgaagaaatggcgaccgaaccggactccgaaccgtctaacaatgagcccgtccccgacgagactggcagtgagatcagtggacccccagaagactccaaatctgacatccaaagcccctgccaggccttcgaggaagtccgagtgggtggagactacagcccacctccggaggaagccatgccattcgagacacaacagcccagcctgggagatttctggcccaccctggagcagccaggaccatctgggaccccatcaggcctccaagccttcaacccagcgattttggagcccgggacccccactggcgcgagcccaggcctgggagcctatacccccccaccagaagaagctatgccatttgagttcaacgagcctgcccagggagaccatagccagcctcccttgcaagtcccagaccttgcgccaggaggtccggaagcattggtccccagagctcttcccgcggagcccgggaacatcagatttgaaaacgctggcttccgagaagactacagccctccccctgaagaatctgtgccatttcaggtcggtggagaagaattcgggggcgatagcccacccccaggactcccgcgagtcatcccacaaatcggcattggcggcgagttcccgacagtcgcggtcccgagtgcgctctgcctcgctcccgccgagaacgcgcctcccctctgggtccgaggcgccattgacagaccattccgcgaggctgtcagatctcctcctaacttcgcatgcgacagccccccgatggagatcaccagacccctgcttgagattggcagagcctccattggggtcgacgacgacaccgctgtcaatatggacagccccccaatcgcaagtgatggcccgcccatcgaagtctcgggagccccagataagagcgagtgcgcagagagacccccagttgagcgagaagcagccgagatggaaggaagccctaccaccgccactgcggtggaaggaaaagtcccctctccggagagaggggacggatcttccacccagcctgaagcaatggatgccaagccagcccctgctgcccaagccgtctctaccggatctgatgctggagctcctacggattccgcgatgctcacagatagccagagcgatgccggagaagacgggacagccccaggaacgccttcagatctccagtcggatcctgaagaactcgaagaagccccagctgtccgcgccgatcctgacggaggggcagccccagtcgccccagccactcctgccgagtccgagtctgaaggcagcagagatccagccgccgagccagcctccgaggcagtccctgccaccacggccgagtctgcctccggggcagcccctgtcacccaggtggagcccgcagccgcggcagtctctgccaccctggcggagcctgccgcccgggcagcccctatcacccccaaggagcccactacccgggcagtcccctctgctagagcccatccggccgctggagcagtccctggcgccccagcaatgtcagcctctgctagggcagctgccgctagggcagcctatgcaggtccactggtctggggagccaggtcactctcagctactcccgccgctcgggcatcccttcctgcccgcgcagcagctgccgcccgggcagcctctgctgcccgcgcagtcgctgctggccggtcagcctctgccgcccccagcagggcccatcttagaccccccagccccgagatccaggttgctgacccgcctactccgcggcctcctccgcggccgactgcctggcctgacaagtacgagcggggccgaagctgctgcaggtacgaggcatcgtctggcatctgcgagatcgagtcctccagtgatgagtcggaagaaggggccaccggctgcttccagtggcttctgcggcgaaaccgccgccctggcctgccccggagccacacggtcgggagcaacccagtccgcaacttcttcacccgagccttcggaagctgcttcggtctatccgagtgtacccgatcacgatccctcagccccgggaaggccaaggatcctatggaggagaggcgcaaacagatgcgcaaagaagccattgagatgcgagagcagaagcgcgcagataagaaacgcagcaagctcatcgacaagcaactggaggaggagaagatggactacatgtgtacacaccgcctgctgcttctaggtgctggagagtctggcaaaagcaccattgtgaagcagatgaggatcctgcatgttaatgggtttaacggagagggcggcgaagaggacccgcaggctgcaaggagcaacagcgatggtgagaaggccactaaagtgcaggacatcaaaaacaacctgaaggaggccattgaaaccattgtggccgccatgagcaacctggtgccccctgtggagctggccaaccctgagaaccagttcagagtggactacattctgagcgtgatgaacgtgccgaactttgacttcccacctgaattctatgagcatgccaaggctctgtgggaggatgagggagtgcgtgcctgctacgagcgctccaatgagtaccagctgattgactgtgcccagtacttcctggacaagattgatgtgatcaagcaggccgactacgtgccaagtgaccaggacctgcttcgctgccgtgtcctgacctctggaatctttgagaccaagttccaggtggacaaagtcaacttccacatgttcgatgtgggcggccagcgcgatgagcgccgcaagtggatccagtgcttcaatgatgtgactgccatcatcttcgtggtggccagcagcagctacaacatggtcattcgggaggacaaccagactaaccgcctgcaggaggctctgaacctcttcaagagcatctggaacaacagatggctgcgcaccatctctgtgattctcttcctcaacaagcaagacctgcttgctgagaaagtcctcgctggcaaatcgaagattgaggactactttccagagttcgctcgctacaccactcctgaggatgcgactcccgagccgggagaggacccacgcgtgacccgggccaagtacttcattcgggatgagtttctgagaatcagcactgctagtggagatgggcgccactactgctaccctcactttacctgcgccgtggacactgagaacatccgccgtgtcttcaacgactgccgtgacatcatccagcgcatgcatctccgccaatacgagctgctctaagaagggaacacccaaatttaattcagccttaagcacaattaattaagagtgaaacgtaattgtacaagcagttggtcacccaccatagggcatgatcaacaccgcaacctttccatgatcaacaccgcaacctttcc

SEQ ID NO: 308 - DNA, 1404 bp, Mus musculus
ggttcgggcggcgggggcgggggcggggccggggtggtgccaaggctgcagcgggccgggcaagatggctgccgtagaggccgagacggggctgctgaccctggagtcgctgcccaccgaccctctgctgctcatcttatccttcgtggactacagggacctaatcaattgttgctatgttagtcgaagacttagccagctttcaactcatgatccactgtggagaagacattgcaaaaaatactggctgatatctgaggaagaaaaagccgggaagagtcagtgctggagatccctcttcatagagacctactcagacgtggggaggtacatcgaccattacgccgccattaaaaaggcctggcgtgacctcaagaagtacttggagcccaggtgtcctcggatggttttatctctgaaagagggcgcacgtgaggaagacctggatgctgtcgaagctcagatcggttgcaagctcccggatgattatcgctgttcataccggatccacaacgggcaaaagttagtggtgccggggttgctgggaagtatggcactgtccaatcactaccgctctgaagatctactagatgttgatactgctgcaggaggatttcagcagagacagggactgaaatactgtctccctttaaccttttgcatacacaccggcttgagtcagtacatagctgtggaggctgcagaggggcggaataagaacgaagtgttctaccaatgtccagaccaaatggctcggaatcctgctgctattgacatgtttatcataggtgctacttttaccgactggtttacatcctatgtcaacaatgttgtatcaggtggtttccccatcatcagagaccagattttcagatatattcatgatccagaatgtgtggcaacaactggagatattacagtttcagtgtccacatcgtttctgccagaactcagctctgtgcatccgccacactatttcttcacataccgaatcaggattgaaatgtcaagggatgctcttcctgagaaggcctgtcagttggacagtcgctactggaggataacaaacgctaaaggggatgtggaagaagtccagggacctggagtagtcggtgaatttccaattattagcccaggtcggatatatgaatacacaagctgtaccacattttctacaacatcaggctacatggaagggtattacaccttccattttctgtactttaaggacaaggtctttaatgttgccatcccccgattccacatggcatgtccaacattcagggtgtctatagctcgattggtaagttaattttttttcctagtgctggatatatgactttgttctaagaccaaccatctttgtttaggtagataagtagtttataatgatgtccctcctcc

SEQ ID NO: 309 - DNA, 2002 bp, Mus musculus
tgtttgcagtctggttaccaagttagcgtttggttgcatctacaccatgtccaccttcgagaagcctcagatcattgtccacattcaaaagggcctcaactacacagtgttcgacagcaaatgggtgccctgcagtgccaaattcgtgacgatgggcaactttgcccggggcaccggcgttatccaggtgtacgagatccagcgcggggacctcaagctgctgcgggagattgaaaaggccaagcccattaaatgtggaacatttggtgccgcatctctgcagcagagattcttagctactggagattttggtggaaatcttcatatatggaacttggaagctccagagatgccagtgtattctgtaaagggccacaaagaaatcataaataccatagatggtgtaggtggacttggaattggggaaggagcccctgaaatcgtgacgggcagccgtgatggaactgtaaaggtgtgggacccaaggcaaaaagaggatcctgtcgctaacatggaacctgcacaaggagaaaacaagagagactgttggaccgtggcatttggcaatgcttataatcaagaagaacgtgttgtctgtgctggctatgacaatggggacatcaagctgtttgacctcaggaacatgtcactgcggtgggagacaaacattaaaaatggggtatgcagcttggaatttgacagaaaggacatcagtatgaataagttggtagctacatctctagaagggaagttccacgtcttcgacatgagaacacagcatcctaccaagggctttgcttctgttacagaaaaggcccataaatccactgtatggcaagtccggcacctgcctcaaaacagggagatctttctgacaacgggaggcgctgggagtcttcacctctggaagtatgaatacccaactcagcggtcaaagaaagattccgagggcttggagatgggagtcgcaggttccgtcagccttctgcagaacgtgaccgtgtctactcagcccatctccagtttggactggagtcctgacaaaagggggctctgcgtctgtagttcatttgaccagatggtgcgtgtgctgatagttacaaagctccagaccatttgactcagactttacacttgacattgtccagagggttgctcacagaactgtaacttgatctgtgttctgcatcctctggccccattgaagacggttggatttgagtgatgagtgacagccatgggcacaaagccagccagccagcctctagcatctttgggtgtttgctggcctgaccagcatgctgctgcacgtgaaggccccacacaccagcaccagctttgttccttttccccatgtttctactcagaaacattagggccaggagttgtggtgccagctacttaacaagctgaggcaggaggatcaatgtagtccataagatcaagactagcttgggcagcatagtgagactctgcctttaaatatagttggatgagacccaagtttgatcatcagtatctctatcaggtgacttataattcctgtaagtccagttgcagggcatctcataccattttctggctgtattgggcagtggtacccacagacacatgcacattcttagaaattaaaaaaaaattgtttttaaattaaaaaaaaatgtaaagccaaagtcagtagttgttatttaagtgtatttaagtctgttctgtatctgcatagctctgtgctttctctgtacactgtgctcctactcggagtcacttcacttgctctgtaaagctccagaagaacacggttcgactagccagcctggagaactgttttcagcagtgtaactggtaaaatactgtgacttccagctgtctctcgtttactcagataccagccttagttgtcttttgactgtggtaagtgatgacgagccgttgaagattgaatttgtttttaaacctttttgtcaaacctttaaaatatatattttaaaataaacaggttttt

SEQ ID NO: 310 - DNA, 3444 bp, Mus musculus
ggctgcggccccaggaccgggttctctcagacaagagggcgggcggaggaggaagcggccgagcacccgcccgcctcagcagacttcgcaccgtccgctcccaggcctcgcggcaccgagaaggggagaccgaggcggaccgcgaggacaagaggcggcgggggcgcggggcggaggcggcgcggccggccgcggctgccgctttgttgtgtggcccgggccgaggaagcagaagtgggaggaggggggagctctgcgtcccgctccctccgcggctcatggcgacggcgctcggcacatccgggaccctccggccctggcggccgcggcgcgggctgttcggaccccggccccggccgctgtggtgactcctctgcgcctcgccgtcggcccagcccagcccagtccgcccgcccgcccgccggcccgccggccgcgagcgccgccgccgccgccgccgccacctcccccgccgctggggacatgtctaaccccggaggccggaggaacgggcccgtcaagctgcgcctgacagtactctgtgcaaaaaacttggtgaaaaaggattttttccgtcttcctgatccatttgctaaggtggtagttgatggttctgggcagtgccattctacagatactgtgaagaacacacttgatccaaagtggaatcagcattatgacctgtatatcggaaagtctgattcagttacgatcagcgtatggaatcataagaagatccataagaagcaaggtgctggatttcttggttgtgttcgtcttctttccaatgccatcaaccgcctcaaggacactggttatcagaggttggatttatgcaaactggggccaaatgacaatgatacagttcgaggacaaattgtagtaagtcttcagtccagagaccgaataggcacgggaggacaagttgtggactgtagtcgtttgtttgacaatgatttgccagatggttgggaagaaaggcggactgcctcgggaagaatccagtatctaaaccacatcacaagaactacacagtgggaacgcccaacacgaccggcgtcagaatattctagtcctggcagacccctcagctgctttgtggatgagaatactccaattactggaacaaatggtgcaacgtgtggacattcttcagaccccagactagcagagagaagagtcaggtcccagcgacatagaaattacatgagcaggacacacttacacactcctccagacctaccggaaggctatgaacaaaggacaacgcagcagggtcaggtatatttcttacatactcagactggtgtgagcacatggcatgatccacgagtgcctagggatcttagcaacatcaattgtgaagagctcggtcctttgcctcctggatgggagatccgcaataccgcaacaggaagagtttatttcgttgaccataacaacagaacaacacaatttacagatccccggctctctgctaacttgcatttagttttaaatcgtcagaaccagttgaaagaccaacagcaacagcaagtggtgccattgtgtcccgatgacactgagtgtctgacagtgccaagatacaagcgagatttggttcaaaaactaaaaatcttgcggcaagaactttcccaacagcagcctcaagctggccactgccgtattgaggtgtctagggaagagatttttgaggaatcatatagacaggtcatgaaaatgaggccaaaagatctatggaagcgattaatgataaaatttcgtggagaagaaggtcttgactatggaggagttgccagggaatggttgtatctcctgtcacatgaaatgttgaatccttactatggtctcttccagtattctagagatgatatctacacattgcagatcaatcctgattctgcagttaatccggaacatttatcctatttccactttgttggacggataatgggaatggctgtattccatggacattatattgacggtggcttcacattacctttttataaacagttgcttgggaagtcaattactttggatgacatggagctagttgacccagaccttcataatagtttagtgtggatacttgaaaacgatatcacaggtgttctggaccataccttctgtgttgagcataatgcatatggtgaaataatccagcatgaactcaaaccaaatggcaaaagtatccctgttactgaagaaaataaaaaagaatatgtcaggctttatgtcaactggagatttctccgaggcatcgaagctcagttcctggcgctgcagaagggctttaatgaagtcattccccagcacctgctgaagacatttgatgagaaggagctggagctcattatttgtggacttggcaaaattgatgtgagtgactggaaggtcaacacccggttaaaacactgtaccccagacagcaatgtcgtcaagtggttctggaaagcggtggagttttttgatgaagagagacgagcacggttgctccagtttgtgacagggtcctctcgagtgcctctgcagggcttcaaagcactacaaggtgctgcaggcccacggctctttaccatacaccagattgatgcctgcacgaacaacttgccaaaagcccacacttgcttcaatcgaatagacattccaccctatgaaagctatgagaagctctatgaaaagctgctaacggccatcgaggagacatgtggctttgctgtggaatgatgggcaccaaggacttacctacagctcttatttattccctggccaacagcctccttcagcagcgcttcagagaacgctgggatacaggacagcctcctcccctgttccttagattctaggacactgggaggggaaaggacaattttgaaattccttttcaaggaaaagtaaaggtctttatgctttgccatgaggacacactcagctgctatttaaaaattaataccttgaacctaaagaatgctgaccccctgcgtctccagagttaggcagtattctacacttaaaagactactactatttttatacaaggttatctccccaaattgcttgtcagactcatgtctctcccgcatagcaagacaactccagcagtcggtacaagtcacacttcattttgattgagtacatgatttttgaacaactcctatacctgctctttgtaagaaattaaataaagttattttggattgttccacctttgtaaacaattggctaaagagggatcattaccttgatgaaattaagccatttacatgtttagttgtgtttttctatagcagagtgttatattttgcattatgtgggtcaccgtagcttaagtggggttttatatttttcaagtgtgactttcttggaaattcttaatgcagccatttaaacagtttatttgctacccttcctgtttttaagatgacttaaaaaaaaaaaaaa

SEQ ID NO: 311 - DNA, 1239 bp, Mus musculus
actaaaactctgtgagagagttacaaaggtattaaattgggttagggaacaacctgaaaagaaccagaattgcaacaatatgtaccacaactccagaacaataccatactccgccttctgcaacaggtggcacagatttatcagagcattgagttttctcgtttgacttctctggttccttttgttgatgctttccaactggacgggccatagtagatgcagccaggcactgtgacctgcaggtacgtattgaccatacttcccggactctgagttttggatcagatttgaattatgcaactcgagaagatgccccagttggccctcatctgcagagcatgccttcggagcagataagaaaccagctcacggccatgtcctcagtgcttgcaaaagccattgaagtcatcagacctgctcacattctgcaagagaaagaagaacagcatcagttggcagttaatgcatatcttaaaaattcaagaaaagagcaccagaggatcctggctcggagacagacaattgaggaaagaaaagagcgtcttgagagtctgaatattcaacgtgagaaggaagaactcgagcagagggaagctgaactccagaaagtacgaaaggctgaagaagaaaggctgccaagaggcaaaggagcgagagaaggaacgaatccttcaagaacacgagcaaatcaagaagaaaactgttcgggagcggttagagcagatcaagaagacagactgggcgccaaagcatttaaagatattgacattgaagaccttgaagaactggatccagattttattatggccaaacaggttgaacaactggagaaagaaaagaaggattaccaggaacgcctgaagaatcaagaaaagaagattgactattttgagagagctaagcgtttggaagaaattcctttaataaagagtgcttatgaagaacacagggttaaagacatggacctgtgggaacagcaagaagaagaaagaatcactacaatgcagctagaacgagaaaaagctctggagcataagaataggatgtcacgaatgttggaagacagagatctatttgtgatgcggctcaaagtcgcccggcagtctgtctacgaggaaaaactgaaacagtttgaagagcgcttagcagaagaaagcatagtcgcctagaagatcggaaaaggcagcggaaagaagaacgcaaaataacttattacaaaaaaaaaaaaaaaaaaaaaaa

SEQ ID NO: 312 - DNA, 1335 bp, Mus musculus
gacgtgctcgcgccgcagccaatcgcggagaacgctgtccaggagcaaggaggctgtggtgagagaccgaccaagaccggagatgtttttaagcctggccccggcggcatcaggggctgttgcagcggcgacggagacaccggcagcggcggccacccggaggtcctcgttcagggggtgaacccttctgcgcccgctgagcctcggatccaggatgagaagactgttagaagaagcagctagctgaacagctataaaatgcccaaatctgggttcacaaaaccagttcagagtgaaaattctgacagtgacagcagtatggtggagaggccatatggaagaaagagtaaagacaagattgcatcttacagcaaaacttcaaaaattgaccgaggtgatatgggcaaggaaatgagagagaaaccatccatgaaacgaaagctgccttttacagtcagcccatcgagaaatgaggagcgcgactcagacacagaaaaagaaggtccagagaagaagaaaacaaaaaaagaagctggaactaagaagtccaccccagttagcattctttttggttatccactttctgaacgaaagcagatggcactcctaatgcagatgacagcaagggacaacagcccaggtgattgacatccacagccattgagttactgtgtcttctcagctggcctagggtcagggtaactttgtctttaacagttcttttttactagtttgaaattgtatcctttattgtatttaatcagcactattcataacatcagtttttaattttctcattgtgtgcgtgacattttattattgtatccaacattggattacaaggtctgtaagagcaagaatcctctgtttcctgggcggtaagtaagtgcttgttaaataagacctgtgatttgaaattgaagtatttgtaagtgggatcctatgtaaatttctttaaaaataaaataaatccttaacttttaagataaaatttaaacattttttaggaaattatttatttttatgagagtgtgtgtgcgtgtgtgtgtgtgtgtatgcacgcacctgagtatgtgtgtgtgcctgccacgttcatacaggagcatgttgaaattagaaaaggtgttggagtctctggacttgagttagaaactgttgggagctgcaggtgtgggctgggatttaaacccaagtcctatgcaggaacagttattgagctctctcgtacttctttatgaaaagaaaagattctttgattattttcactgtccttttgggtttttaacctctgctgtttgagaccttgtgctctttaataaaggtatttgaacattt

SEQ ID NO: 313 - DNA, 1022 bp, Mus musculus
aagcgaagaccgagagttctcggggactcgctcagctccggccgttagagccacttcctcctcctcccagtcctacggaagctctgccagcggctgccacttcagcgagccgggccatggccgaatattcctatgtaaagtccaccaaactcgtgctcaagggcactaaagccaagagtaaaaagaaaaagagcaaagataagaagagaaaacgggaagaagacgaggagacccaacttgatattgtgggaatctggtggactgtatccaactttggggagatttcaggaactattgccattgaaatggataaaggagcctatatccatgcactggacaatggactgtttacactgggagctccacacagagaagttgatgaaggccccagtcctccagagcagtttactgctgtcaagttgtctgactccagaattgccctgaagtctggctatggaaaatatcttggtataaattcagatggacttgttgttgggcgttcggatgcaattgggcccagagaacaatgggaacaagtgtttcaagatgggaagatggctttactggcctcaaatagctgctttattagatgtaatgaagcaggcgatatagaagcaaagaataaaacggcaggagaagaagaaatgataaagatcagatcctgtgcggaaagagaaaccaagaaaaaggatgacatcccagaagaagacaagggaagtgtgaagcagtgtgaaatcaactatgtaaagaaatttcagagcttccaggaccacaaactcaaaataagcaaagaagatagtaaaattcttaaaaaggctcggaaagatggatttttacatgagacacttctggacaggagagccaaattgaaagctgaccgatactgcaagtgacgtggacattttgtgtagctttgggtttttttctgtggttttttgttgttgttgtttctttctttctttgtcccctctctctctctctctctctttctctgaataaaaatatttgatataagtaaaaaa

SEQ ID NO: 314 - DNA, 1727 bp, Mus musculus
ccggagtggtggccgaacctggggtacagcaggggactcttaggcagggaccatggcggacggtggctcggagcgggccgatgggcgcattgtgaagatggaagtggactacagcgccacggtggaccagcgcctgcctgagtgcgagaagctggccaaggaagggcggcttcaagaagtcatcgaaacccttctctctctagaaaagcagacccggactgcctctgacatggtgtccacgtcccgcatcttggttgcagtagtgaaaatgtgctatgaggctaaagaatgggacttacttaatgaaaatattatgcttctgtcaaaacgacggagtcagttaaaacaagcagttgcaaaaatggttcagcagtgctgtacttacgtggaggagatcacagacctgccagtcaagctgcgattgattgatactctgcggatggttacagaaggaaagatttatgttgaaattgagcgtgctcggctgactaaaaccttagcaactattaaagagcaaaatggcgatgtgaaagaggctgcctccatccttcaagagttacaggtggaaacctatgggtccatggagaagaaggagcgagtggaattcattctggagcagatgagactctgcctagctgtgaaggattacattcgcacacagatcattagcaaaaaaattaataccaaattcttccaagaagaaaacacagagaacttgaagttgaagtactataacttaatgattcagctggatcagcacgaggggtcctatctgtccatctgcaaacactacagagccatctatgacactccctgcattcaggcagaaagtgacaagtggcagcaggctctgaaaagtgttgttctctatgttatcctggctccttttgacaatgagcaatcagatttggttcaccggataagcagtgacaagaagctggaagaaattcccaaatacaaggatctgctgaagctttttaccaccatggagctgatgcgctggtccactcttgttgaggactatggggtggagctgcgaaaaggctcctcagagaccccggcgactgacgttttcagctctacagaagaaggggaaaagaggtggaaagacttgaagagcagagtggtggagcacaacatcagaattatggccaagtactacactcggataacaatgaaaaggatggcacaacttctggatctctctgtggatgagtcagaggctttcctctcgaatctagtcgttaacaagaccatctttgctaaagtagacaggttggctggagtcatcaacttccagagacccaaggatccaaataatttattaaatgactggtctcagaaactgaactcgctgatgtctctggttaacaaaacgacacacctcatagccaaagaggagatgatacataatctacaatgaggctctggatgcttttagaagacacaaaattggaggtcattaaaaaagaaagactgttttcatggtgtatatgttgtttttttcttactctcgaccttttttgctaaaattttaagatagtaaatgtgtttaagccccctctgcctttcccactctctgatttcatgataactgcaaaacattttttcagtctgaagacagaaaggtttgtgtctcagctttccttgagtgtgttcatactatttgtttttattcacctgacagccacgtgatagtaataaaaacaggacatgtgttagctccc

SEQ ID NO: 315 - DNA, 1213 bp, Mus musculus; identical to SEQ ID NO: 219

SEQ ID NO: 316 - DNA, 1213 bp, Mus musculus; identical to SEQ ID NO: 219

SEQ ID NO: 317 - DNA, 2097 bp, Mus musculus
ccgctctcccgccagcccactccccaccgcagccatggacgccatcaagaagaagatgcagatgctgaaactggacaaggagaatgccatcgaccgcgcggagcaggccgaagccgacaaaaagcaagctgaagaccgatgcaagcagctggaggaagagcagcaggccctccagaagaagctgaaggggacagaggacgaggtggaaaagtattccgagtccgtgaaggatgcccaggagaaactggagcaggctgagaagaaggccaccgacgctgaagcagatgtggcctctctgaaccgccgcattcagctcgtagaggaggagttggatcgggcacaggagcgcctggctacagccttgcaaaagctggaggaggctgagaaagccgcggatgagagcgagagaggaatgaaggtcattgaaaaccgggccatgaaggatgaggaaaagatggagctgcaggagatgcagctgaaggaagccaagcacatcgctgaggactcagaccgcaaatatgaggaggtggccaggaagctggtgatcctggaaggggagctggagcgctcggaagagagagccgaggtggctgagagtaaatgtggggacctagaggaggagctgaaaattgttaccaacaacttgaaatccctggaagcccaagcggacaagtattccaccaaagaggacaaatacgaagaagagatcaaacttctggaggagaagctgaaagaggctgagacccgagcagagtttgctgaaagatctgtggcaaagttggagaaaaccattgatgatctggaagatgaagtctatgcacagaagatgaagtacaaggccatcagcgaggagctggacaacgcactcaatgacatcacttccctctgagtccccactgtggccatcgcaggcccctttctctcctctctttacattctctctgaggggagggggcagccaggaggagcaccagctagccacgttgcacagccagcctgagggcagcctgaggaacacgtctgccacccctgccacccactctggcactggcttttctcctgccatctatctaccatgcactgacctccacccctccactacttaataaactctgaacttggtctccatgctcttctactccggaagcccttctccctttcaaagcactgattcactcctgagtccctggcttttactgctgtcctccatctgtgacgctcagccctcctccctcagcacactgtggctcacacagaccctcctgcactgcactcccagcctgtcactttctgataatcaatgcatgtggctatacacacccttcctccccacctcggcagcccagtcactgaccttggcacacttaactgggattccaggatctgagggcattgctgagagggaaatggggtgctggggtcaggggagggggccagaaggtcaggaaaggtctggtgtgaaggtcgttaaagtcttggatctctacaagaggggcttttgcagcatctgcaggtctgttttctgtcccatgtctgtctgaccttccctttcctggctgaacctttgtctttccttttgtttccatctttcctaaccttctaaaggcttctaaaggaaggcaccccgtttacgttacaggcctccccatcccagtgtcactaccccagccaaggcctagagcaagatttgcgtctagatagtccacccacttacccctaccataggccccccggtctcttaacatgactcaggtctcctaacacatctcaggtctcctaacatgtcccaggtctcctaacacgtcccaggtcccctaacaagtcccaggtccataagtgtctcctaacattcctaacatggtttttgtctgtgtcacctttccctgtccatggttcccttccctcctgtttaccctcccctacctcacctgctgcttcccctcacagagactttggccagtgccaaggaagagaacgtggagatacaccagaccttggaccagacccttctggaactcaacaacctgtaagggctggccctgctgcctaccagactacatagttgcctcctcgggccaataaactgatgttactggc

SEQ ID NO: 318 - DNA, 3541 bp, Mus musculus
ccattctgatgttggagcggccgctattgaagtttttttttttttttctctggtgtcccactgacgccgctcctgtgttcctgagccagtgttcgggctgtcccggggcggctggcggactcggttaggggccggaccccgcgatctgtccgggtcaccgccctcccggcctgccctctttccggtccacactagggacgcctgaggccgtggggtccctgagctgggccggggagctcggggctcatcccctcctcccgaggctcggatgggaggtggcgggaggagagacctgggatgttcagtctgatggccaactgctgcaacttgttcaagcggtggcgggagcctgtcagaaaggtgacacttgtgatggtcggccttgataatgctggtaaaacagccacagcaaagggaatccaaggagagcatcctgaagacgtagctcccactgttggcttttctaaaattgatctgagacaaggaaagttccaagttaccatctttgacttaggaggtggaaaaagaattcggggaatttggaagaattattatgctgaatcctatggggtaatatttgttgtggattccagtgatgaggagagaatggaagaaacaaaggagacaatgtccgaagtgctaagacacccgaggatatcaggaaagcctatattggtgctggccaacaagcaagacaaggagggggctttaggcgaagcggatgtgattgagtgtctctcgctggagaagctggtcaacgagcacaagtgcctgtgtcagatcgaaccttgttcagcagtcttgggatatggaaagaaaattgacaagtccattaaaaaggggctttattggctactgcatatcattgcaaaggactttgatgccttaagtgaacgcatccagaaagacacaactgaacagcgagctcttgaggaacaagagaaacgtgagagggctgaacgagtccggaagttaagggaagaaagagaacgagagcagacggaacttgatgggaccagtggtctggctgagattgactcaggaccagttcttgcgaatcctttccaacccattgcagctgtaatcattgagaatgaaaagaagcaggaaaaagagaaaaagaagcagaccgtggagaaggacagtgatgttggtctcctagaacataaagtggagccagagcaagcagcgcctcagagtgaggcagattgctgcctccaaaaccctgacgagcgagtggtggacagttacagggaggcactgtcgcagcagctggacagtgaggatgagcaggaccagcgagggtcagagtccggggaaaacagtaagaagaaaaccaagaaactaagaatgaaaaggagtcagcgggtagaaccagtcaatacagacgagtctactccaaagagtcccacgcctccccaacctccccctcctgttggctggggaacccccaaagtcactagacttccaaaacttgagcctcttggtgaaacacgtcacaatgatttctatgggaagccgctgcctcccctggctgtgcgacagagacctaacggtgatgctcaggacacgatctcataaccaagtcggatgggttggtcctttttatatcagcaaggtgaactgagacctttccccaaagcagaaaagccctgaatgctgatgatgggcaagacaaccataatgatttcagggaagaaagaatatccaagaacttgacctgataatgtacttctccatcttctgtggttaaagcagaaaggaaacaaaatgaccagtagctgaaaagagcatctggccacgtaagcagtcatggcatcgatgctctggtttacacatcccgacttttggacatactcctgaagaaaaacctcacaagttgagccaatggactctacatacctgattatttaataatctgtatttctatgcattaaacatgttttataagatatatgtacatgaaaggggaattcctgggaaattataatctaaattttaactatttttatatttttttctaaaccttttgtttaagtttgctattgtattgactacgctctttctacagatgctctgtttaaactgtctggatagaaagttgatttactgtacacacttgaagtgtacaagcatgtatgctttgtgataacattgtttctaaaatgtacactccatcttgatgtaattttaaaatagttactattttaaaaagcaaattctcagatctttaatctaccaaattacatgatttgagagtggtacccaaggagagaattcagttctgttgttgctgttcattttccttggtgatgatatcaataaatgttaagatgtgtgaaatacctttaagaaaataactaaaattgttaaattagaaaaatgtatcctgtgggataatgattcaaaatcctcacccccccccccccaagggactagaccttctctgagttcagggccctctctgtgctctctgtcagcagcttcattgactgcttgggttgttttctttcgtccatgccttgaaattaaaggtaaaaggctcctgagggtctagagacttcaggtttccagccagcatggctgtacaaataaagatgttggtgcaagtcctttcataaagcactagttctaacatgacttcttaattttagatgacaatattctgctcttgagtgccattgataaggttctctgtccaacggccctttaccaaaacttgtagagatattttagtaatggatttataaggtaatattcaattggaggcatgcctttaagtcaaggtgaaaataacaaagatcaagtcccttctcaccctgttaagattggtaccatatactggcaatgaacatacactggtttctgaatgtaagtccacctaaggtagattgatctgatcatttgccttttaaatgtttataatgtattgtgttcatatttgagctccttggacccggatcagtcaggtcacatgatgctagttggccctggtagtgtttctgtgagtttgttcattgtacttggcacagtgatggggaaaaggtttaatttctatgcaaaacatatatgcaaaattagcaggtggctcacataagagaaccacaagacaggatgtacattctgaactggattttagagggaaaagtgctcatcttcttggttcattttgtaatatttaaattgccttttaaaactaaacttatacttttgctatcttttaatgctcatctggtttgaagatattcttgcttcctaccagtgtttactataaagtacagtaattactgactctatttcatgaaaacagttttgaaattgaatgtaacataaaccggaatcgatgttttctatggcactctcaaaaaattaatgttttcttaaagctgtatataaaaaatcctttaaaaactgttttgtaaatcctgtcagattttaatatttcagtccttattttgttatacattttcattctattcatcatgaattatataacatttcacacaataaaaaattatttacaaaaaaaaaaaaaaaaaaa

SEQ ID NO: 319 - DNA, 2246 bp, Mus musculus
gcgctcactcgcactcacaccccggcgctggaggcgggcggcccgggccccaccggccccccatggacgcccccggcacggggcgctgagacccccgcgtcgttgctcagctcggaccagcgcgccaagccgaggtatctccagacaggacaagtctctgaagacttcccagcccctaacccagtacctttgaccagcttgcccctagctctcccacctgccactccctggcccctcccaccaccagccctcccatttttttggggagcagggcatggtgtgaaaggctgagtactgagggggttactatgggtgctgtgccctagggcctgggtggcggggggtgggtggcctgtgggcgtgggggggccagtgtgcccaccccagtctcttggcgtgctggagagcatcctggatggaattgaagtgaatggaacagaagccaagcaaggtggagtgtgggtcagacccagaggagaacagtgccaggtcaccagatggaaagcgaaaaagaaagaacggccaatgtcccctgaaaagcagcatgtcagggtatatccctagttacctggacaaagacgagcagtgtgtcgtgtgtggggacaaggccaccggttatcactaccgctgtatcacttgtgagggctgcaagggcttctttcgccgcacaatccagaagaatctccatcccacctattcctgcaagtatgacagctgctgtgtcatcgacaagatcacccggaatcagtgccagctgtgccgcttcaagaagtgcattgctgtgggcatggccatggacttggttctagatgattcgaagcgggtggccaaacgcaagctgattgagcagaaccgggagaggaggcgaaaggaggagatgattcgctcactgcagcagcgaccagagcccactcctgaagagtgggacctgatacatgttgctacagaggcccatcgcagcactaacgcccagggcagccattggaaacagaggcgaaaattcctgccggatgacattggccagtcacctattgtctccatgccggacggagacaaggtagacctagaggccttcagcgagtttaccaagatcatcaccccggccatcacgcgcgtggtggactttgccaaaaaactgcccatgttctccgagctgccttgcgaagaccagatcatcctcctgaagggctgctgcatggagatcatgtccctgcgggcagctgtccgctacgaccctgagagtgacaccctgaccctgagtggggagatggcggttaagcgggaacagctcaagaatggtggcttgggtgtggtctctgacgccatctttgaactgggcaagtcactctctgcctttaacctggatgacacggaagtggctctgctgcaggctgtgctgctaatgtcaacagaccgctccggcctgctgtgcgtggacaagatcgagaagagtcaggaggcctacctgctggcgtttgagcactacgtcaaccaccgcaaacacaacattccgcacttctggcccaagctgctgatgaaggtgactgacctccgcatgatcggggcctgccacgccagccgcttcctccacatgaaagtcgagtgccccaccgaactcttccccccactcttcctggaggtctttgaggatcaggaagtctaaagcctcaggcggccagagggtgtgcggagctggtggggaggagcctggagagaagggacagagctgggggctgagggagaacccccatctcttctctccttcctcccatccttggatagatgcagctcccatacacccctgcactgcccagccccctcagaccctccagcccttggacagggccataaatgaacttgctatgaaaggcagtatgggaggctaggacccaagttctagagtctctgggaccccaacctctaaaaaaagtaggggaagggaagtaggaagaattgagagggacatgccatcttgactgtagggtcaggaggaatgaggagtaggggcaggtgcccttactcacccctatacacacagagagccctgccaagttccttggcctagatttcccttcaggccacaggtctctacttccccaaatacctgggtcctgggtgcaaaggacagcttggcttggcttggcttggcttagctcctcccctggaggctaaaaaaaaatggtagtcatcctaactgcactttggaaaccaagcaaggggagaatatagatgaagaaaaactagac

SEQ ID NO: 320 - DNA, 1284 bp, Mus musculus
ccggtagccaccgtgcgtgtgaacaaactcggcctggcgggtcgcagcgccgcgcggcgaccgcgaggcgaccgggagccgctgggacccaggctgcgcgcccctcggcctgcccgggagccgcgccagtcggagtcccgggccgagcggggcttgcctccctctcagcgttcctctgtgcgcagtgcagccagcgggcatgaccgatccaccaggggcgcgcccgccggcgcctgcaagccgcgggtgaagaagaaagtccggccccgctcttctcagagcgagaaggtagggagcagcagcagggagttgactagaagtaagaaagtgacccgtagcaagaacgtgaccgggacccaggtagaggaggtgaccaagatcgaggaggcgacccaaaccgaggaagtaactgtggcagaagaggtgacccagaccgacaacatggccaagaccgaggagatggtccagacggaggaaatggaaacacccagactcagcgtgatcgtcacccacagcaatgagaggtatgaccttcttgttaccccacagcaaggtaacagtgagccagttgtccaagacttggctcagcttgttgaagaggccacaggagttccactaccttttcagaagctcatatttaagggaaaatctctgaaagaaatggaaacaccgttgtcagcacttggaatgcaaaatggttgccgagtcatgttaattggtgaaaagagcaatccagaagaagaggttgagttaaagaagctgaaagatttggaggtatctgcagagaagatagctaaccacctgcaagaattgaataaagagctttctggcatccagcagggttttctggctaaggaattgcaagcggaggctctctgcaaacttgataggaaagtaaaagcaacaattgagcaattcatgaagatcttggaggagattgacacaatggtcctaccagaacaatttaaagacagcaggctaaaaaggaagaatttggtgaaaaaggttcaggtgttcttagcagagtgtgacacagtggagcaatacatctgccaagagacagagcggctgcagtctacaaacttggccctggctgaatgaagtgcagtggagagtggctgtactggcctgaagagcagctttacagccctgccctctctggaacagaagtcgcctgtttctccatggctgccaggggcaactagccaaatgtcaatttccctgctcctccgtcggttctcaatgaaaaagtcctgtctttgcaacctgaaaaaaaaaaaaaaa

SEQ ID NO: 321 - DNA, 2589 bp, Mus musculus
ccacgcgtccgcaccgccggcatggcgcattacaacttcaagaagattacggtggtgccgtctgccaaggactttattgacctaacattatccaagactcaacgaaagactccaacggttattcataaacattatcaaattcatcggattcgacatttttatatgagaaaagtcaaatttactcaacagaattaccatgacagactgtcacagattctgtcggatttccccaaattggatgatatccatccgttttatgctgacttgatgaatattctctatgacaaggatcactacaagttggctctaggtcaaataaatattgccaaaaacttggtggacaatgttgctaaagattatgtgcgtcttatgaaatatggtgattctctgtaccgatgcaagcagctgaagcgcgcggcccttggacgaatgtgtactattatcaagagacagaggcagagcttggagtatctggaacaagtacgtcaacatttatcccgcttgccaaccattgatccaaatacaaggactctgcttttgtgtgggtatccaaatgttgggaaatccagcttcatcaacaaggtgacaagagcagatgtggacgttcaaccctatgcatttaccaccaaatctctgtttgttgggcacatggattataagtatctgcgctggcaggttgtagataccccagggattttggatcatcctttggaggatcggaacaccattgagatgcaggccatcacagccctggcccacctccgagctgcagttctgtatgtgatggatctgtctgagcagtgtggacatgggttaaaggagcagttagaactcttccagaatatcagacctctgtttatcaacaagcctcttattgttgtagcaaacaaatgtgatgtgaagagaatagctgaactttctgaagaagatcagaaaatatttctagacttgcaggctgaaggattccctgtcatcgagaccagtaccctgactgaggaaggtgtcattcaagttaaaacagaggcgtgtgacaggcttttggctcaccgagtagaaacgaaaatgaaaggaaataaagtgaatgaggttctgaacagattgcatttagctgtgcccaacaagagagatgataaggagagaccccctttcatcccagaaggagtgatagctcgaaggaagagaatggagattgaagagcccaagaagaagagggagcgagatcttgagctggaaatgggagatgattacattttggatcttcagaaatactgggacttaatgaattcatctgagaaatatgataagataccagaaatttgggaaggccacaatgttgctgattatattgatcctgctatcatgaagaaattagaagagttggaaaaggaagaagagctaagaacagctgctggggagtatgacagtgactctgagagtgaagacgaggaaatgatggaaatccgacagctggcaaagcaaattagagaaaagaagaagttgaaaattctacagtccaaagaaaagaataaacagggacccaggatgccccgaactgccaagaaggttcaacgggcagatttagagaatgagatgcgtagtcttggtgtggacatggatgataaaaacaatgcccactatgcagtccaggcaagaaggtctcggagtgtcacgaggaaaagaaaacgagaagaatctgttccaccctcttccacagcgcggagtcgcagttgttctagaactccacgtgatgtttctggtcttcgggatgtcaagatggtgaagaaagccaagactatgatgaagaaagctcagaagaagatgaatcgcttggggaagaaaggggaagctgataggcatgtgtttgatatgaagcccaagcacttgctgtctgggaagaggaaagctggtaaaaaggacaggagataatgtcctcttcagttggaacagtttaagtagactcttggttattttgggtgtggtatggtgtgttatagaatttggaatcaccatctgttgaccaaaagaaacagtgggaatgacttttaaatgcttgctgctttgctggaaactggcaaaccctactaagtgtgcagtgctgtgctcactgcgcagtttgggtttttatgtccagtgcgttccgtacttgatgagcttctttcagcattttacagaaaagacttattggtgtacggaggctgcgtgggtggaggaaaactgttttgtagtgggacttttgtcacctaaagtacctatttttgttaagaaagtatacctgctgggaggtctaggcagaaggctatcctccttacatttagggtttatcagagcttaaactactcttaaattattttctaaacctgtagtacaatgtatcattgtaacttcaaccattttatccaaagtaaacacccagcaaaaacatagtttgatgacttacattttgtttgatttaattgcaatacacttgatgaccaaaaggggtggtggtggcagggaataggactttgcttttttgttcttagaataaaaaataaaggaagtaagtgcctggggtataggctcaaaaccaaaaaaaaaaaaaaaaaaaaa

SEQ ID NO: 322 - DNA, 4627 bp, Mus musculus
gctggcctctctcagttgctcatctgggcgggcggcggctgctgcaactgaggacagggcgggtggcgcatctcgagcgcggaggcaggaggagaagtcttattgttcctggagctgtcgcctttgcgggttcctcggcttggttcggccagcccggcctctgccagtcctgcccaacccccacaaccgcccgcggctctgaggagaagtggcccgcggcggcagtagctgcagcatcatcgccgaccatggaagacatagaccagtcgtcgctggtctcctcgtccgcggatagcccgccccggcccccgcccgctttcaagtaccagttcgtgacggagcccgaggacgaggaggacgaggaagacgaggaggaggaggaggacgacgaggacctggaggaattggaggtgctggagaggaagcccgcagccgggctgtccgcggctccggtgccccccgccgccgcaccgctgctggacttcagcagcgactcggtgccccccgcgccccgcgggccgctgccggccgcgccccccaccgcccctgagaggcagccgtcctgggaacgcagccccgcggcgtccgcgccatccctgccgcccgctgccgcagtcctgccctccaagctcccggaggacgacgagcctccagcgcggcctccggcgccagccggcgcgagccccctagcggagcccgccgcgcccccttccacgccggccgcgcccaagcgcaggggctcgggctcagtggatgagaccctttttgctcttcctgctgcatctgagcctgtgataccctcctctgcagaaaaaattatggatttgaaggagcagccaggtaacactgtttcgtctggtcaagaggatttcccatctgtcctgtttgaaactgctgcctctcttccttctctatctcctctctcaactgtttcttttaaagaacacggataccttggtaacttatcagcagtggcatccacagaaggaactattgaagaaactttaaatgaagcttctagagaattgccagagagggcaacaaatccatttgtaaatagagagtcagcagagttttcagtattagaatactcagaaatgggatcatctttcaatggctccccaaaaggagagtcagccatgttagtagaaaacactaaggaagaagtaattgtgaggagtaaagacaaagaggatttagtttgtagtgcagcccttcataatccacaagagtcacctgcgacccttactaaagtggttaaagaagacggagttatgtctccagaaaagacaatggacatttttaatgaaatgaaaatgtcagtggtagcacctgtgagggaagagtatgcagattttaagccatttgaacaagcatgggaagtgaaagatacttatgagggaagtagggatgtgctggctgctagagctaatatggaaagtaaagtggacaaaaaatgctttgaagatagcctggagcaaaaaggtcatgggaaggatagtgaaagcagaaatgagaatgcttctttccccaggaccccagaacttgtgaaggacggctccagagcgtacatcacctgtgattcctttagctcagcaaccgagagtactgcagcaaacattttccctgtgctagaagatcacacttcagaaaacaaaacagatgaaaaaaaaatagaagaaaggaaggcccaaattataacagagaagactagccccaaaacgtcaaatcctttccttgtagcaatacatgattctgaggcagattatgtcacaacagataatttatcaaaggtgactgaggcagtagtggcaaccatgcctgaaggtctaacgccagatttagttcaggaagcatgtgaaagtgaactgaacgaagccacaggtacaaagattgcttatgaaacaaaagtggacttggtccagacatcagaagctatacaagagtcaatttaccccacagcacagctttgcccatcatttgaggaagctgaagcaactccgtcaccagttttgcctgatattgttatggaagcgccattaaattctctccttccaagcactggtgcttctgtagcgcagcccagtgcatccccactagaagtaccgtctccagttagttatgacggtataaagcttgagcctgaaaatcccccaccatatgaagaagccatgagtgtagcactaaaaacatcggactcaaaggaagaaattaaagagcctgaaagttttaatgcagctgctcaggaagcagaagctccttatatatccattgcatgtgatttaattaaagaaacaaagctctccactgagccaagtccagagttctctaattattcagaaatagcaaaatttgagaagtcggtgcctgatcactgtgagctcgtggatgattcctcacccgaatctgaaccagttgacttatttagtgatgattcaattcctgaagtcccacaaacacaagaggaggctgtgatgctaatgaaggagagtctcactgaagtgtctgagacagtaacacaacacaaacataaggagagacttagtgcttcacctcaggaggtaggaaagccatatttagagtcttttcagcccaatttacatattacaaaagatgctgcatctaatgaaattccaacattgaccaaaaaggagacaatttctttgcaaatggaagagtttaatactgcaatttattccaatgatgacttactttcttctaaggaagacaaaatgaaagaaagtgaaacattttccgattcatctcccattgagataatagatgagtttcccacatttgtcagtgctaaagatgattctcctaaggagtacactgacctagaagtatccaacaaaagtgaaattgctaatgtccagagcggggccaattcgttgccttgctcagaattgccctgtgacctttctttcaagaatacatatcctaaagatgaagcacatgtctcagatgaattctccaaaagtaggtccagtgtatctaaggtgcccttattgcttccaaatgtttctgctttggaatctcaaatagaaatgggcaacatagttaaacccaaagtacttacgaaagaagcagaggaaaaacttccttctgatacagagaaagaggacagatccctgacagctgtattgtcagcagagctgaataaaacttcagttgttgacctcctgtactggagagacattaagaagactggagtggtgtttggtgccagcttattcctgctgctgtctctgacagtgttcagcattgtcagtgtaacggcctacattgccttggccctgctctctgtgactatcagctttaggatatataagggtgtgatccaagctatccagaaatcagatgaaggccacccattcagggcatatttggaatctgaagttgccatatcagaggaattggttcagaaatatagtaattctgctcttggtcatgtgaacagcacaataaaagaattgaggcgtctcttcttagttgatgatttagttgattccctgaagtttgcagtgttgatgtgggtatttacttacgttggtgccttgttcaatggtttgacactactgattttagctctgatctcactcttcagtattcctgttatatatgaacggcatcaggcgcagatagatcattatctaggacttgcaaacaagagcgttaaggatgccatggccaaaatccaagcaaaaatccctggattgaagcgcaaagcagaatgaaaaggccccaaacagtagacattcatctttaaaggggacactcccttggttacggggtgggcgggtcaggggtgagccctgggtggccgtgcagtttcagttatttttagcagtgcactgtttgaggaaaaattacctgtcttgacttcctgtgtttatcatcttaagtattgtaagctgctgtgtatggatctcattgtagtcatacttgttttccccagatgaggcacttggtgaataaaggatgctgggaaaactgtgtgttatattctgttgcaggtagtctggctgtatttggaaagttgcaaagaaggtagatttgggggcaggaaaaacaacccttttcacagtgtactgtgtttggttggtgtaaaactgatgcagatttttctgaaatgagatgtttagatgagcatactactaaagcagagtggaaaaatctgtctttatggtatgttctaggtgtattgtgatttactgttagattgccaatataagtaaatatagacataatctatatatagtgtttcacaaagcttagatctttaaccttgcagctgccccacagtgcttgacctctgagtcattggttatacagtgtagtcccaagcacataaactaggaagagaatgtatttgtaggagcgctaccacctgttttcaagagaacatagaactccaacgtaaccgtcatttcaaagatttactgtatgtatagttgattttgtggactgaatttaatgcttccaaatgtttgcagttaccaaacattgttatgcaagaaatcataaaatgaagacttataccattgtgtttaagctgtattgaattatctgtggaatgcattgtgaactgtaaagcaaagtatcaataaagcttatagacttaaaa

SEQ ID NO: 323 - DNA, 3456 bp, Mus musculus
ggtttagtgccatggttccttgttcttggtgttggtcgtgatgagtcctgaaatggcagaggagtcctgtaaatgcaatggctggaagaaccctaacccctctcctactccaccaagaggagacctccagcagataattgtcagtttgacagaatcctgtcgaagctgtagccatgcccttgctgctcacgtttctcacttggagaatgtgtcagaggaagagatggacagactcctgggaattgtgttggatgtagagtacctcttcacctgcgtccacaaagaagaagatgcagataccaaacaagtgtacttctacctattcaagctcttgagaaagtcaattttacaaagaggaaaacctgtggttgaaggctccttggagaagaagccgccatttgagaagcccagtattgaacagggtgtgaacaacttcgtgcagtacaagtttagtcacttgccatcgaaagagaggcagacaacgatcgagctggccaagatgtttctgaaccgcatcaactactggcatctggaggctccatctcagcggagactacggtctcccaatgatgacatctctggatacaaggaaaactacacaaggtggttgtgctactgcaatgtaccgcagttctgtgacagcttacctcggtacgaaaccacaaaggtgtttgggagaacattgcttcgctcggtcttcaccatcatgagacgacagctcttggaacaagccagacaggaaaaagacaaactgcctcttgagaaacgcacgcttatcctcacacatttcccaaagtttctgtccatgttggaagaagaagtgtatagtcaaaattctcctatctgggatcaggattttctctcagcctcttccagaaccagcccgctaggaatccaaacagtaatcagtcctcctgttactgggacagcattgttcagttcaaattccacttcccatgagcagatcaatggagggagaacaagtcctggatgcagaggctcttctgggcttgaagcaaacccgggagaaaagaggaaaatgaacaactctcatgctcccgaggaggccaagagaactcgagtgatgggggatattcccgtggaattgatcaatgaggtcatgtctaccatcacagaccctgcagggatgcttggaccagagaccaattttctgtcagcccattcggccagagatgaggcggcacggctggaagaacgcaggggtgtcattgaattccacgtggtgggcaactccctgaaccagaaaccaaacaagaagatcctgatgtggctcgtgggcctccagaatgtgttttcccaccagctgcccagaatgcccaaagagtacatcacacggctcgtctttgacccgaaacacaaaacccttgctttaattaaagatggccgtgtcattggtggtatctgtttccggatgtttccatcccagggattcacagagattgttttctgtgcagtaacctcaaatgaacaagtcaagggctatggaacccacctgatgaaccatctcaaagaataccacataaagcacgagatcctcaacttcctcacatatgcagatgagtatgccatcggctatttcaagaagcagggtttctccaaagaaatcaaaatacctaaaaccaaatatgttggctacatcaaggattatgaaggggccactttgatgggatgtgagctgaaccctcagatcccatacacagagttctctgtcatcattaaaaagcagaaggagatcattaaaaagctgatagaaagaaaacaagcccagattcgaaaagtctaccctggactttcgtgtttcaaagatggagttcggcagattcctatagaaagcattcctggaatcagagagacaggctggaaaccaagtggaaaagagaaaagtaaagagcccaaagaccctgagcagctttacagcaccctcaagaacatcctgcagcaggtgaagaaccatccaaatgcttggcctttcatggaaccagtgaagagaacagaagctccgggatattatgaagttataaggttccccatggatctgaaaaccatgagtgaacgcctcaggaacaggtactatgtgtctaagaagttattcatggcggacttgcaacgagtgttcaccaactgcaaggagtacaaccctcccgagagcgagtactacaaatgcgccagcatcctggagaagttcttcttcagtaaaattaaggaagcagggttgattgacaagtgatttctttcccttagacacacatcagcagtgtgcctaaaacaggtcatttaggtttttggttgcttttgtttttttgtttttgtttttaaattgtacatcatgtgttgaagagacttgtaataattagcacttttgaaaaacaaacaaaacctccttttagcttttcagagacgtatttaaatggaaatcatagattttttttttattttgagcaatagattttaatctatttactactatcatgtaatttttctctggcatgtccagtagctgactattgcatggtagatgatcaggggcttcctcaaaacctgtatgtgaggaaattgcacacagtaccaagatttggggtaatctagagaaaagtttgaccatgaatgtctccattttttttctaatggaacatgagagtttattttattctgaaggactttaaagggtccgtgacacacctgtgctgtgaatgaactgtgtgatgtttgaagtctccttgtagactttttataagtatatatttttaaaacactcatctagatgaggtgctttgagcagttctgaaaaaaaaaaatgcagcttccacaatagcggctgctatgactcctaaggaagggactttttataagctcctggggctttgatcattctgtctacctattacagacttgagagtgcacaaccactatttaataatatcttggcagatatgtgtccatctcatatttgactttgcttgtgcagggcccaacttctaaaagatccgttcccaggccacaaaggtgttagcttgaaaatatttgaggttgagttaatgttaagacatgtggcctaaacatgaacccaggggagccttgcttcactatgtaaggattctttgtattttctggtacatttaaccccatcaccagtgtctatgtgaacatttcccatttgcacttccagagttttgtttgtctgaggtgaactgaattctcaccaaagtttaggccagtattttaacacctccattgttttattggtccagggttatatcccactaacattcgctgtacaatcttattaaccatttttgtcttgggactccagcttagtgcttggatttatttcctaattacactacatagaaaagtgggacacctgccagcccaactctgggaaaaaccaactaatatacaaccatattaaatgaaggccaccttaatggtctcgac

SEQ ID NO: 324 - DNA, 3811 bp, Mus musculus
accaccagagcacggggggagccggccgccctgccgcccgcgcctcggcgaccccgcggggctgaggcgacgccgcacccggcagcctgagcgcacagccggccttgacccagagctcggagccgcgagcgccgcgccctccgccggccccacccatccggaccgcggccatggccgagaccgaggagcggagcctggacaacttcttcgccaagagggacaagaagaagaagaaggaacggagcagtcgcgcggccaacgcggcgagcggcgcgggcgggagcagcgcggcggcgggctccaggccgggcgatggcgggagcctgggctccggtgccaggtcgggcgacggcgggagcttgggctccggctccaggtcgggcgacggcgggagctcgggctctggtgctaggtccggagacggcgggagctcgaggtccggagacggcgggagcgcgggccccgccggcaaggccataacgaaggatgaaaatgagtggaaagaatttgagcaaagagaggttgattacagcggattaagagttcaggcaatgcaaataagtgaaaaggaagatgatgataatgagaagagagaagatccaggagataattgggaagaaggtggaggtggcagtggagcagaaaaatcttcaggtccctggaataaaaccgctccggtacaagcgcctcctgctccagtaacagttacagaaaccccggagccagcaatgcccagtggtgtatacaggcctcctggggcaaggctaaccacaacaaggaaaacgccacaaggaccaccagaaatatacagtgacacgcagttcccatccctgcagtccactgccaagcatgtagagagccggaacaggtacttaaaatgaatactacctgaagttaaatgaccacatatggcacatctacatcttattagggacatgaattttcaaaaataaagtgggaagaaatgtaaatggcatcagatggaaaatttttttgggtggttttaaagtaaatcccagccttttcacctcgttgagagcacagctggcttgaatttagacctctacttggacttgcttctccgttctgtcctcacatgtgggggactctgggagagcagtgacttgccacacacatctttctgtacctgatctaatcagaccactcccccaaagcaaaagggaggagaaattgttgaatgatgagaacattacttgaatgaggaaattgttgcccttatgcataaagacgtattatctactaactgcgaaaacttagaagtgagtcttagaaggaatgtcattatacagcttctttctggttgttttcaagttggtcccaaaatatgcagaagatgggacctcggagcttcagtacagtattacatgttttctgttcaattgaagccttaaaatggtttgataaggatttttgtattctcttcctgtctctccaggattatccttagggtctttttttttttttttttttttttctttttaaattcgaggaagagtactttcaaaattccctagtgaagaagaaatatttactgattacatttcttttcccttagggataaagaaatggagaagagctttgaagtagtaagacacaaaaatagagatagggaggaggtttcaaaaaaccaggcccttaaacttcagctagacaaccagtatgctgtgcttgagaatcagaagtacagccacacacagtacagctaaggaatggtctttgctaagccttccaaggtaactagaccacagctaaccaccaagaacagccattcatcgttttgatttctggatctacagtgactgactgaagacctcaagtccagtgactgtccctgttgcactatggaagttcaagagtcacgactgatcttgatgtgtgttggatttagggtgtttcattgtcttaaatatttgtgaattagattcaacagtgtttccatagttgctctgcgtataaaaccaaacctgcagccagtggtcattcaaacatctttatgttcagatactgagccttcgcaaggttgactacctcagatttgctgcccttagttgtggatttcatgtggatcacatcttctacataaggttacagctactagtgtctgtgtgaaccttgaaaccaactctactggattcctgtcagaaagccttcagaagtcagccatctgggttctgagccgctgtaaaagatgaagagttaagtgaccttaattaacctgttctgtgccccatcctaaggcatactctgtaggctgtggctatgttagactccctggaacaagccgctgtcagaaatgatgtgtttggatcatctgtgtggggcttatgatttataatttaagtttttagttttatgcggtaactgtggatttaattcaaccaaactctggtccaccaaatggggagtgggtgggggggtagtcttatttctttgaataatttttcattcagatagtgcttgttcggttccacattaaggccttgctttgactcagagtaagttctttaagggcatattgtctgaaatatgtctgaaagaagcattggaattgtaaaatgccctatgaatttgccaatccttaggtggaaccagatagcctttgatgcatataaaggacagcggatccgctgcactccaggtgctgctcaagcctcctaatcaggtctaattgaactgctgtggacagagtgtggcgtctgctcactgctatcgatagtgtggtgtctgctcactgctgtggacagtgtgtgacgtctgctcaggaggagagggtttcactgacctggcttttaacagttcaaagcaacaggagcaaaacacccaagttgcgcatgaatctggcatggtgtctgataaatccttgtgtgtgccccaaatgtgaaggttatgggctattcattgtttagccagctcttgacattcaccttgggagtatgtttggtaatcacttggagacgcaggggaatagtcagtaatgtagcatttctgttgtaatttcaatttaactatctagtagtacttggctcttagaagaggttactgctaaatttctttctacctaatgaaatagcctgtcagttacctaccttgtcactacagatggttcagtacacatactctatgttggcatatgactatgtgatacaatactagtgcctgggtttctctctgtaaacgaatccctttgccaaacacaggtcagacttgctcactactgacaggagtggaacaggaaatggatgttttcccagcttgagagcatgtttagtggatttagggcagcagtgtaggaagcaggaggtggaggccagtgtcacctgaccagactgtatgccacttcagagcaataatgttggcatgatctgaaccagccaggaggaggttgagtgattagaggcttgagattcttagttgaactgaagacttcatttgggcaccagaaacgttaacaccttgagccacaaacttcccttaaagtatgcttcactccagcgtgacacacaaacacagattctgtttggggttatggtttaagacgtgaacagaaacatgatgaggtttgtttaatggcatactgtactggaacgctgaagaactgcagcagatgtaaattccaagtcttgttattttttaagattgtgaaattatcaaaatgcatatgaatcaagttttaatacactgtctgggtggatgaggctgtccattgcaccatttctttctttgggttctcaggcatggttctgacagtgtaagaactctgtaacatttaacattgaataaacagtaaacc

SEQ ID NO: 325 - DNA, 1174 bp, Mus musculus
atgggatctctgcttttttcttggaagggcacacagcagaaagacgttactatcaagtcagatgcgcctgacaccctgttgctggagaagcatgccgattatattgcttcctatggctcaaagaaagatgattatgaatactgcatgtctgaatacctgagaatgagcggcgtctattggggcctgactgtgatggacctcatgggacagcttcatcgcatgaaccgagaagaaatcctggtgtttatcaagtcgtgccagcatgagtgtgggggaataagtgctagcattgggcacgacccccaccttctgtacacgctcagtgctgtccagattcttactctgtatgacagtgttcatgttatcaacgtagataaggtcgtggcctatgttcagagcctacagaaagaagatggctcctttgctggagacatttggggagaaattgatacaagattctcattttgtgcggtggcaactttggctcttttgggcaagcttgatgctattaatgtggaaaaggcgattgagtttgttttgtcctgcatgaactttgatggtggatttgggtgcagaccaggctctgaatctcacgctgggcagatctattgttgcacaggattcctggccataactagtcagttgcaccaagtgaactccgacctacttggttggtggctttgtgaggcgcagttgccctcaggcgcactcaatggaagacgcgagaagttaccagatgtgtgctattcatggtgggtgttggcctccctaaagatcatcgggagacttcattggattgtcagcgaaaagcttcgaagtttcatcttagcgtgtcaagatgaagagacgggaggatttgcagacagaccaggagatatggtggatccctttcataccttatttggcattgctgggttgtcacttctgggagaagagcagatcaagcctgttagccctgtcttctgtatgccagaagaggtgcttcagagggtgaatgtccagcctgagctagtgagctagtcagatgggagagatgctgtagtgtgcaatatgaattactgctgtatttgaagtgtttatcaaacctagacgtgacttaatattttgtatatcatatgttaatgataaattatataagtattgtaaaataaatatgttgtatttagaggaattc

SEQ ID NO: 326 - DNA, 2833 bp, Mus musculus
ccacgcgtccggggacttcgctctcaactcgttgcctgacgtggcggggaggaagctgtggcgcctccggaaccggccgcagcggtgacagcgcgcctgcgcgcttccgcctcgccctggccccagcagcggcggcggcgaggccctgcggagcccgccagcgccctctcggcctcttcacttctctgaccgcggtgtccgggactacgtgagaaccatgagtggcaacaacttgagcgggaacgatgagtttgatgagcaattgcgaatgcaagaattgtatggaggagaccccaaggaaggtgacacccagaatgagccctctggagaagcccattctttgggacaaccaccagatgacactccttacgagtgggaccttgataagaaggcttggttccctaagatcaccgaagatttcattgctacgtatcaggctaactacggcttttctagtgatggtgcatccagctctactgcgaacgtccaggacgccaacactaaggctgtagaagaacctccacaaaaagaagtcccggagacccctgactccaaaaggaagggggaaaagagaaaggctgaatctggatggttccatgttgaagaagacagaaatacaaatgtatacgtgtcaggtctccctccagacatcacagtggatgaatttattcagctcatgtccaaatttggcattattatgagagatcctcagactgaagagtttaaagttaaactgtacaaagatgatcaagggaatcttaaaggagatgggctttgttgttatctgaagaaagaatctgtggagcttgcattaaaacttttggatgaagatgaaattagaggctacaaattgcatgtggaggtggcaaagttccagctcaagggtgaatacgatgcctcaaagaagaagaagaagtgcaaagattataagaagaagctgtctctacaacagaagcagttggattggagacctgagagacgagctggaccaaaccggctgcgccatgagcgagttgtcattctcaaaaatatgtttcaccccatggactttgaggatgacccattggtactgaatgagatcagagaagatctgcgagtagaatgttccaagtttgggcagattcggaagctccttctgtttgatagacacccagatggtgtggcctctgtgtccttcagagagccagaggaggctgaccattgtattcagactctggatggaaggtggtttggtggccgacagatcactgctcaagcctgggatgggactacagattatcaggtagaggagacctcaagagaaagagaggagcggctgagaggctgggaggcattcctcaatgctcctgaggccagcagaggcctccggcggatggattccatcgctggttcagaaaggccagggccttccagaatgaggcatttttcagagcacccaagtatgtctaatatgaaggctcaggaagctacaactggaatggcatttgaagaaactatcgatgaaaataagtttgaaaaggcagaagaagggggagaatccgaaggagatgcttctgaaaaagatgccaaagaaggtgggtctgatggggaccaccctgagagagagggtggagaaggctgctccaagaaagagaatgaagagggctgccctgagagggcgcttgagcctgaggagggtaatcctcaaaccgaggctcaagagaatggccctgaaagggaagctaggaagaaaagcaaaatggattatgagaagaatggcttttcaaaagagtctgaagacaatgaccttggcaaggagtctgaaggggaagacagcctcaagaaagagtcggaagatgatgattcagaggaggaatctgaggaagacagctcagaaaagcaatctcaagatggctctgacaaagaaatagaagaaaatggtgttaaaaaagatgttgaccaggatgtctctgacaaggagttcccagaagatgttgagaaagagtcagaagaaaatgagactgacaaatcagaatttgatgaaggttctgaaagagtgttagatgaggaaggctcggagagagaatttgaggaagactcagatgaaaaggaggaagaaggtgatgatgatgaagaagaggtcgtatatgaaagggtttttgatgatgattctgatgacattgaggaggaagaagaagcagatgaaaaggagtgtgaagatgctgatgacaaagaggaagacaatgatatagatgaaaagctctttgatgactccgatgagaaggaagatgaagaagacacagatggaaagaaagatgatgatgccagtgacaaggtattcgaagacaattccaatgagaagttgtttgatgaggaagaaggtcccaatgagaagttgtttgatgattctgatgagagagggactgtggggaatgtgaaggaagatgggtctcagtccacagacagcagctttgccctcagtagtagtgatgatgatgatgatgaagtgtaatcttttccagttgcttcttagggagagccctgcatctccatttgcccatgcttcagggtcaatagtagtgttacagcaacatgtgcatagtggtaggatgccatctgactaatgtctcgaagggttttgttctcacctgtaccagtggatttaaatatgtttattggttcttcagttcaaaacttcacagttaccatgcaagtaaactggatatctgtcattttgttggatttgttaaatgcatgcaaaagaatatttttaaagtattctaattggagtttgtgatattcagaaataaagattaaattggtaatatgcagaacctgaaaaaaaaaaaaaaaa

SEQ ID NO: 327 - DNA, 3287 bp, Mus musculus
cccttcatgaactacaatcaacagctgctttctctcagactactgagaaaataaattcaaattgggaacctggtgttaatgttgacttggcagttaccatgcagcgacaccatctgcagcagctattctaccgctacggagagaatgattccttgtctgttgaaggcttcagaaaattgcttcagaacataggcatagataagattaaaagagtccatatacaccatgaccacgagcatcatgctgaccacgagcatcactcggaccatgagcatcactcggaccacgagcatcactcggaccacgagcatcactcggaccacgagcaccattcccaccgcagtcacacggttgctggtaaaaacaatcggaaagccttttgtccagaccttgactctgataattcaggtaaaaatcctagaactagtctagggaaaggatctcgcccagcagagcacatgaatggtaggaggaacatcaaggagagtgcaagctctagtgaagtgacctcggcggtatacaacgctgtctctgaaggaactcgctttgtagagacaatagagactccaaaacctgggagacgcaccaaagatgtaaaccttctaccccacccagcatcacggagaaaagccgagtgggccggctgagtcggctagctaggaagaaaagcaatgagtctgtgagtgagcccagaaagagctttatgtattccagaaacacaaatgacaatattcaggagtgtttcaatacaaccaagctgctgacatcccatggcatgagcatccaggctctgttgaatgcaacggaatttaactatctctgcccagccatcatcaatcaaattgatgctcgggcttgtctgattcatacagcaagtgagaagaaggcagaaatccctccaaagacctattctttacaaatagcctggcttggtggcttcatagccatttccatcatcagtttcctgtctctgctgggagtcatcttggtgccactcatgaaccgggtatttttcaagttcctgctgagcttcctcgtggcgctggccgtcggaacgctgagtggcgatgctctgttacatcttctcccacactctcatgcaagtcatcagcacagtcatagccatgaagagccagcgatggaaatgaaaagaggccccctgttcagccacctgtcggctcagaatatagaagaaagctcctattttgattccacgtggaaaggtctgacggctctagggggcttatatttcatgtttcttgtggaacacgtactcacactgatcaagcaatttaaagataagaaaaagaagaatcaaaagaaacctgaaaatgatgaggatgtggagagcaagaagcagctgtccaaatacgactctcagctttcctcaaatgaagagaaggtggacccaggggaacgacctgaaagctatctgcgagccgactcccaagagccctccccctttgattcccagcagccgacgatgttggaagaggaagaggtcatgatagcccatgcacacccacaagaagtctacaatgaatatgtgcccaggggctgcaagaacaagtgccattcacacttccacgatacgctgggccagtccgacgacctcatccaccaccatcacgactaccatcacattctgcaccaccaccaccaccagaaccaccaccctcacagccacagccagcgctactctcgagaggagctgaaggacgccggcattgccacattggcctggatggtgatcatgggcgacgggctgcacaatttcagtgacggccttgctattggtgctgccttcaccgagggtttgtccagtgggctaagcacctctgtcgctgtgttctgtcatgaactgcctcatgaactaggtgactttgctgttttgctaaaggctggcatgactgtcaagcaggctgtgctctataatgctctgtcagccatgttggcctaccttggaatggcaacagggatattcatcgggcattatgcagaaaatgtttctatgtggatattcgcactcactgccggcttgttcatgtatgtcgctctggttgacatggtgcctgagatgttgcacaatgatgctagtgatcacggatgcagccgttggggatatttcttcctgcagaatgctgggatacttctcggttttggaattatgttactcatttccatatttgagcataaaattgtgtttcgtataaatttctaattaggttctaaaccctagagcagcttaaagaagtactgttgtttgtagttccagtagatggtagaaatacgttcatatgctgtgatacacagcatttaaaactagtgagttttgcaatttttctatcaaattttgccatttgttatgcttataaagtcagttccattgggtaacataaaggtacgttttaatatttaagttattctgttttggaaatgtaaattctgtgtgtgatccaccagtattacccagctgtatgtttcggcatgccgtgtcttgtctattctagagaaaatgtctttagtgctcttctgtgtagctttagcattacttccctgctggagttgggcccttgctcgtgctgagaaagaatgggcacaaaacccaagacaccaacagttcacactgagcatagtcaggaaataggaggaaaagagaactcgggaggattgaggaggtatatattgctttgaaaaatcacaaggttggttgtaacgttgagagggggaaattctagatgtgttttaaaggggcatgtttagttccgagtacgtgcgtggacatctgtcaaattgttatgttcctgtgaaacaagtgaacactctgatacacttcatctgcttgtacatctgtatgatagagaaatgtaaatatgttaatccaagcaatgtgtcacttggctgagaaatgaggcatttaaatctgtgtgtggagatgggccaaatgagtaactagtgtgtcaccagaagacttggttttcaccatggtctcttatgcctgaagttatgtgaacattctagttgtctaggcttccaagtggcaagtattaaaactttagcccatgagaggatgttaagacctgttctgaaaatattttgacttcttggattcaaaaagcacttagctctctttctctctcagtgctttaaaatgtcattgtgaacaactgtcctttgatgtatgacactgtagatacattggggctgtctgtagcactgtctggatgtttctttcttaaaaaattaaagtgtcaacccagtggcaaaaaaaaaaaaaaaaaaaaaaa

SEQ ID NO: 328 - DNA, 3169 bp, Mus musculus
gcggtgccttcggtcgcgcgcacacgttgcatctccttgcttccacctgaaccctcgccgccaggaaggcagcccgaccagtagaccgcagctcctgggagatggcggcgctgtgcctcacggtgaacgccggaaaccctccgctggaagctctgctggcggtggaacatgtgaaaggtgatgtcagcatttctgtggaagaagggaaagagaatcttcttcgggtttctgagactgtggcattcactgacgtgaattcaatcctgcgctacctggctagaattgcaactacatctgggctgtatgggactaacctgatggagcacactgagattgatcattggttggagtttagtgctacaaagttgtcttcgtgtgatgggctgacttctgcaatcaacgagcttaatcattgcctgtctctgagaacatacctagttgggaactccttgaccttagcagatctatgtgtttgggccaccctaaaaggaagtgctgcatggcaggaacacttgaaacagaacaaaactctagtccacgttaaacgctggtttggctttcttgaggcccagcaggccttccgctcagttggcaccaagtgggatgtttcaggaagcagagctacagtggcacctgacaaaaaacaagatgttgggaaattcgtggagcttccaggtgcagagatgggaaaggtgacagtcagattccccccagaggctagtggttacttacacattgggcatgcgaaagctgctcttctgaaccagcactaccaggttaactttaaagggaaactgatcatgagatttgatgacacaaacccagaaaaggaaaaggaagattttgagaaggtcatcttggaagatgttgcaatgctgcatattaaaccagatcagtttacttacacttcagatcattttgaaactataatgaagtatgcagagaaattaattcaagaagggaaggcttatgtggatgacactcctgcagaacagatgaaggcggaacgtgaacagaggacagaatccaaacacaggaagaactctgttgagaagaatctacagatgtgggaagaaatgaaaaaaggaagccagtttggtcagtcctgttgcctgcgagcaaaaattgacatgagtagtaacaatgggtgtatgagagacccgaccctttaccgatgcaaaatccagccccacccaaggactgggaataaatacaatgtttatccaacatatgactttgcctgccctatagtggacagcattgaaggtgttactcatgccttgaggacaacagagtaccacgaccgagatgaacaattttattggatcattgaagctttaggcataaggaaaccatacatctgggagtacagtcgcttaaatctcaacaacaccgtgctgtccaaaagaaagctcacgtggtttgtcaatgaaggactggtagatggatgggatgacccacggtttcctacagttcgtggagttctgagaagagggatgacagttgaggggctgaagcagttcattgctgctcagggctcctcaaggtctgttgtgaacatggaatgggacaaaatctgggcgttcaacaaaaaggttattgacccagtggccccacggtacgttgcattgctgaagaaggaagtcgtcccagtgaatgtcctggatgcgcaggaggagatgaaggaagtagccagacaccccaagaatcctgatgttggtttgaagcctgtgtggtacagtcccaaggttttcatagaaggggccgatgcagagactttctcagagggtgagatggtcacatttataaactggggcaacatcaacattactaaaatacacaaaaatgcagatggaaaaattacatctctagatgcaaaattgaatttggaaaacaaagactacaagaaaaccaccaagatcacttggcttgctgagagcacacacgctctcccgatcccagccgtctgtgtcacttatgagcacttgatcacaaagccagtgctgggaaaagatgaggacttcaagcagtacatcaacaaagacagtaagcatgaagagctaatgctaggagatccttgccttaaagacctgaaaaaaggagacatcatacaactgcagaggagagggttcttcatatgtgaccagccatacgaacctgtcagcccatatagttgcagagaagctccatgcatcctgatatacatacctgatgggcacacaaaggaaatgccaacatccggatcaaaggaaaagaccaaagtggaaatctcaaaaaaggagacaagctctgctcctaaagaaagaccagcacctgctgtgagttctacttgtgctacagctgaggattcctccgtcctctacagcagagtggcggtgcagggggatgtggttcgtgaattgaaagccaagaaagcgccaaaggaagatatagacgcagctgtgaagcagcttttgactttgaaagctgaatataaagagaaaactgggcaggagtataaacctgggaacccctctgctgcagcagtacagactgtttctacaaagtcatcatcaaacactgtggaaagtacatctttatacaataaagtcgctgcccaaggggaggtggtccgaaagctgaaagcggaaaaggctcctaaggctaaagtaactgaagctgtagaatgtttgctgtccctgaaagctgagtataaagaaaagactgggaaggactatgtacctggccagcccccagcatcgcagaactcacattcaaaccctgtcagtaatgctcagcctgctggagcggagaaaccagaagccaaagtgctatttgacagagtggcttgtcaaggagaagtagttcgaaaacttaaagctgaaaaggcctctaaggatcaagtggattcggcggtacaagaacttcttcagctgaaggcacagtacaagtcgctgacaggaatcgagtataagcctgtgtctgctactggggcagaagacaaagataaaaagaagaaagaaaaagaaaataaatctgaaaagcagaacaagcctcagaaacaaaatgatggccaagggaaagactcttccaaaagccaaggcagtggcctgtcatcaggtggagcaggagaagggcaggggcctaagaaacagaccagattgggtcttgaagcaaaaaaaaaaaaaaa

SEQ ID NO: 329 - DNA, 2539 bp, Mus musculus
gctgggtgtgcgcgagtcaggggctcgtccgaaagccgccgtggcgcaatgaaggtgaagggccccgcccgggggcccgaggtgggatcccgctcgtgccgctgccatgccgctcggtttgccgttgcggttactggtgctgttgctggtgggacggggctgctgtggctgcgcggagggcccacgcgacagcctgcgagaagagctcgttatcactccactgccttccggcgacgtggccgccacattccagttccgcacgcgttgggattcggatctgcagcgggaaggagtgtcccattacaggctcttccctaaagccctgggacagctgatctccaagtactccctgcgggagctccacctgtcgttcacgcaaggcttttggaggacgcgatactgggggccacccttcctgcaggctccgtcaggtgcagagctctgggtctggttccaagacactgtcaccgatgtggataagtcctggagggagctcagcaatgtcctctcggggatcttctgtgcatccctcaacttcatcgacgccaccaataccgtcactcccaccgcctccttcaaacctctgggactggccaatgacactgacgactacttcctgcgctacgctgtgctgcctcgggaggttgtctgcactgagaacctcacgccatggaagaagctcttgccctgcagttccaaggccggtctctcagtgctattgaaagcagaccgcttgttccacaccagttaccactcccaggcagtgcacatccggcctatctgcagaaatgctcactgtaccagcatctcctgggagctgaggcagaccctttcggttgtctttgatgccttcatcacaggacaggggaagaaagactggtccctcttccgcatgttctcccggactctcacagaggcctgtccattggcatctcagagcctagtttatgtggacatcacaggctacagccaggataatgaaacactggaggtgagccctcccccaacttccacataccaggatgtcattttgggcaccaggaagacctatgccgtctatgacttgtttgacacagccatgatcaataactctcgaaacctcaacatccagctcaaatggaagagacccccagataatgaggccctacccgtgcccttcctgcatgcgcagcggtacgtgagtggctatggactgcagaagggagagctgagtactctgctgtacaactcccatccttatcgggccttccccgtgctgctgctggatgtcgtgccctggtacctgcggctgtatgtgcacacgctcaccattacctccaagggcaaggagaataaaccaagttacatccactaccaacctgctcaggacaggcagcagccccacctcctggagatgctcattcagctgccagccaactctgtcaccaaggtctccatccagtttgaacgagccctgctcaagtggacagagtacacaccagaccccaaccacggcttctatgtcagcccatctgtcctcagcgcccttgtgcccagtgtggtggcagccaaaccagtggactgggaagggagccctctcttcaacaccttgttcccggtgtctgatggctccagctactttgtccgactctacacagagcccttgctagtgaacctgcccaccccggacttcagcatgccctacaatgtgatctgccttacgtgcacggtggtggccgtgtgctatggctccttctacaatctcctcacccgaacctttcacatcgaagagcccaagtcgggcggcctggccaagcggctggctaacctcatccgccgtgcccgtggtgtgccccctctctagtccggcgtgcccgtggtgtaccccctctctagtcctgtgagcccgtggtgtaccccctctctagtccggcgcgcccgtggtgtgccccctctctagtccggcgcgcccgtggtgtgccccctctctagtccggcgagcccgtggtgtgccccctctctagtccggcgagcccgtggtgtgccccctctctagtccggcgtgcccgtggtgtaccccctctctagtcctgtgagctcgtgccgaattcggcacgagggggaatcagggttcgattccggagagggagcctgagaaacggctaccacatccaaggaaggcagcaggcgcgcaaattacccactcccgacccggggaggtagtgacgaaaaataacaatacaggactctttcgaggccctgtaattggaatgagtccactttaaatcctttaacgaggatccattggagggcaagtctggtgccagcagccgcggtaattccagctccaatagcgtatattaaagttgctgcagttaaaaagctcgtagttggatcttgggagcgggcgggcggtccgccgcgaggcgagtcaccgcccgtccccgccccttgcctctcggcgccccctcgatgctcttagctgagtgtcccgcggggcccgaagcgtttactttgaaaaaattagagtgttcaaagcaggcccgagccgcctggatac

SEQ ID NO: 330 - DNA, 1639 bp, Mus musculus
cctagctctcctcccgaagtccgccccagcgaacatggcctcaggagttcaggttgcggatgaagtatgtcgcattttctacgacatgaaagttcggaaatgttccacaccagaagaaatcaagaaaagaaagaaggctgtcattttctgtctcagtgcagacaaaaagtgcatagtcgttgaagaaggcaaagagatcttggtgggagatgttggcgccaccataactgatcctttcaagcattttgtcggaatgcttcctgaaaaagattgtcgctatgctttgtatgacgccagctttgagaccaaggagtccaggaaagaagagctgatgttcttcctgtgggcaccagaacaagcacctctgaaaagtaaaatgatctatgcaagctcgaaggatgccatcaagaagaaatttccaggtataaagcatgagtatcaagcaaatgggccagaagacctcaatcggacctgtattgctgaaaagctaggtggctccttaattgtagcctttgaaggatcccctgtgtagaccgccagtcagtgccacgagttgaaagcttccatactgaacactatcctttcactatataagtaaagcaaatatattaggccaggatctcactgaggaatttgtcttgtcatcttttagagtaaactaaaaattgtatagtgtctgcaaacactaccctacctaaatccagcctctaaggtctcactggtgtggaattaaactcttattggccaaatgcctgttttcatgaggtgacttgtaaagattttgttaagctcaggatttttaataacacagttcacaaaacagtacaaggcagtatgacgagaactcatctttgctaacctcagcagttactttgtttcttttgtttagaaaagtgattgcaatccgtgtattttgaccaaagttctctatttttccttgactaaaacaagataatgagacataattttctttataatgtgtacaacacctaatatacactaacagcagtaagactaagccaggcagtcttaaaaaattctatcagatgtgtcatgagactgtttcagactcatgtctgcttaaaattcacgctgaccttgcagagcaccagagcatggggctggccatgcaggaagtgccctgtatctgcagcaggaggctctgggctgggacatggcttagagtgactttctgtcttagaaatcatggtatatcctcaggagaatgttccgtgtctcgcaacaactaattatattgcaaattattagggcttcattgtaatctactttattaatgaaaaatgacaaagcagtgtactgataagccaaggtgcttttgatctgtaatttcttctctaaaactgctgcatctggtacagtagactgtggaaggtgttgattatgtttcctctggggcctggtaggatgctaatccctagagcagtttaccagctatgtgtgaaattgaagcaggtaccatggatgacacgggactgcccaacaacacttggaaatgattgttaacatcacaggcatggcaccgaacactgtagagatgcacagtcagttgaacttagtagcaacgctggctttgtgtaataaaggaagcatttgtaacttaaaaaaaaaaaaaaaaaaa

SEQ ID NO: 331 - DNA, 4501 bp, Mus musculus
ctctgtattttaaaggaggtgatggggcttgcgctggcttgtcctcctgcccaattgaagagttgttgatgttcactggttatgcttagacaatgcgcagtttgttttaatttaaaaattttggggggttagggggtgtaggcttgagaagagcattccgaacctggaggagctcctcattgtccctggtccagacaccccccagcctgtcctcgatgccgtcagccttggccatcttcacttgccgcccgaactcgcacccgtttcaggagcgtcatgtctacctggacgagcccatcaagatcggccgctcggtggcacgctgtcgaccagcgcagaataatgccacctttgattgcaaagtgctgtcaaggaaccatgccctcgtctggtttgatcacaagacgagcaagttctatctccaagacactaaaagtagtaatggtacctttataaatagccagagattgagtcgaggctctgaagaaagtccgccatgcgaaattctttctggtgacatcatccagtttggggtggatgtgacggagaatacccggaaagttacccatgggtgtattgtttccacaataaaactttttctaccagatggtatggaagcccgacttcgttcagatgtcatccatgctccattaccgagtcctgtagacaaagttgctgctaacactccaagtatgtactctcaggaactattccaactttctcagtatctacaggaggccttacatcgggaacagatgttggaacagaagttagccacacttcagcggctactagccatcacccaagaggcttcagatactagttggcaggctttaatagatgaagatagactcttatcacggttagaagttatgggaaaccagttgcaggcatgctccaaaaatcaaacagaagacagtttacggaaggagctgattgcactgcaggaggataaacacagctatgaaaccacagccaaagagtccctgaggcgggttcttcaggagaaaatcgaagtggttagaaaactttcagaagttgagcgaagtctgagtaatactgaagatgaatgtacccacctgaaagagatgaatgagcgcactcaggaagagttgagagaattagccaataaatataatggagcagttaatgaaattaaagatttatctgataaattaaaggtagcagagggaaaacaagaggaaatccaacagaagggacaagctgagaagaaggaattacagacgaaaattgatgaaatggaagaaaaagaacaagagctccaggcaaaaatcgaagctttgcaagctgataacgacttcaccaatgaaaggctgacagctctgcaagtacggttagaacacctgcaggagaaaacccttaaagaatgcagcagcttagggatacaagttgatgacttcttacctaaaataaatgggagcacagaaaaagagaagctgatggtccaagggcatctaaccaaagtggtagaagaatcaaagctttcaaaagaaaatcaggcaaaagcaaaggaatccgacttatcagacactctgagtccaagcaaggaaaaaagcagcgacgacactacagacgcccagatggatgagcaagacctaaatgaaccccttgctaaggtgtctctattaaaagatgacttacagggtacccagtcagaaactgaggccaaacaagacattcagcatcttcgcaaagaattggtggaagcccaggagctagctagaacaagtaaacaaaaatgctttgaacttcaagctcttttggaagaagaacgaaaagcctatcgaaatcaagttgaagaatcagctaaacaaatacaggttcttcaagtccagctgcagaagttacacatggacatggagaatctccaggaggaaaaggacacggaaatctccagcacaagagataaattgcttagtgcccaagatgagattttgctccttcgtcaagcagcagcagaggctgtgtctgagcgggacactgactttgtttctttgcaagaagagcttaagaaggtcagagcggagcttgagggctggaggaaagcagcgtctgaatacgagaatgaaatcagaagtctgcagagcagcttccagcttagatgtcagcagtgtgaagaccagcaaagggaggaggcaacaaggttgcaaggtgagctggagaagttgaagaaggagtgggatgtactggaaacggaatgccattctctaaaaaaggagaacgtgttgttgtcttcagaactgcagcgacaagagaaagaattgcacaattctcagaagcagagttttgaactcacgagtgacctcagcatccttcagatgactaggaaagagctggagaagcaagtgggatccttgaaagaacaacaccttcgggatgcagctgacctaaaaactctcctcagtaaggctgaaaaccaagcaaaggatgtacagaaagagtatgaaaagacacagactgttctctcagaactgaagttgaagtttgaaatgactgagcaggaaaagcaatcaatcacagatgagctcaaacagtgtaaagacaacctgaagctgctgcgagagaaaggaaataatccctccatattacaacctgtcccagccgttttcatcggcctattcctggctttcctgttttggtgtttcggtccattgtggtagagaaagaaaccctggccctggatgcccatgttggcggccctggttgcggtgacagctatggtgctgtatgtaccaggtctggccagagcttctccatgacagtgtgtcttgagtctgtacaccgtcctccctctagaagccggcagcacactcatgctggggacaagcagaaccattctcttcctttttacctcttaaaacagcaaagtgcaagaatacagctggagggtcattgctttaatttatataaaatatatctgtctatagagaggatagaaagttgtgaatttattcggttttacatgtaatttttaaattagtatgttgagattctgaatattatggtggcctaaagtacgcttcttagtgcaccaaattatttataccataaatttatagatattttactctgaattctaatggccacacaattcatttttctgattcgataactactcaaaccgaacaaccaatacatacatgggaatagaggccctgtgtgctcagtgcctatcagtttgaatatatacacacacacatatatatattttttttacatatttacgccatttttacttgttataaaaccactgagctattgggaacaagacttagacaattatttgtgtggattttttttttaaaggaaaactacatttgaaaaatattctcttataataattatttggggaatacatacgtgtttgttcagccttaatgtgacttgaagatgtgaaggacatcagctttgaaaactttccatgagagtttgtattttcttgagcaaactgaaatattactgggagcaaaaacataagtgcataatttcaatgcaatcaaccaaactgttgagtgaattggaatgtaacttactaaacctcatgtatttaagaaatgttttctttaaaagccaagttaccttctcatatacagcagtttagaaagcatgatttttttttctgtcatctgttcctccaagcatgtttaattgaaagaagaattatatctgtttagataagcttttattgacttaatttggttatgatgtggagctaattcacattcaaggtgaactgatgttctctgctagcagatttcttggttgggtatacaaatggttattctctttttgttgttaattggaacagcctgtcaattagtagcactattcccaagattggcattgttccacacacagtgacacacctcagcactgcttggcattatacatttaaacacagaggttaaagtttagctgtggttttgtgcagcaccatagtgatgtcaatgtcctaaagtatcacgtgcttaggttttcttcagtcagggaagactggaagggaaggccagtgagttggtttgaatgttgtatgagaacacccagatctagccagatattgaaaaaggactttaggatataatttgtctgtgatgtttggcagtcattatttttactttaaaagttgtatttaaagctatttgggattgttgccgggagaatcactatattcatggaggaattagccacaaatgacttgtagaaaatactgtcgtatagttcattttaccattctctgttgcaggaagccaccccaccacagaatgctgatatgccagtggtacccagtacctcttgtatatagttattgcaaatactgttatgaaatgcataacttcaaaattaccttttttaaagtaaataattgtttgaaatctattttgtaaagataaaacgtacaatagaatttctggagtacagattaaactatttgcactaacacacgtgatgtgcatgatttaataaaataactttaatctcc

SEQ ID NO: 332 - DNA, 4836 bp, Mus musculus
gaggcggcacctgggcggcggtgatgtcagccgggcgctgtgctccggccccggctcctgtcgccgtgtagggcgcgggggcggccgcgtcgagagtggcgatctggcagccgggcgggtcccgggaggcggaactgcaacttgtggagctcggcggccctccgcctcagtaccaaacgtctatggatcagtttgctaaggacgtgcaagattggaggagctgagaaatcaacactgaacctgttccttttaaagttgaagctggaatttgccccttacgagcaagaagatgatgagtgacgctagtgacatgctggccgcggcgctggagcagatggacggaatcatagcaggttctaaagccttggagtattccaatgggatttttgattgccaatctcccacctccccatttatgggaagcttgcgcgctctgcaccttgtggaagacctgcgtggattgttggagatgatggaaacggatgagaaggaaggattgagatgccagatcccagattcaacagcagaagtgcttattgagtggcttcaaaatcaaatgacaaatggacatctacctgggaatggagatgtgtatcaagaaaggttggcacgtctagaaaacgacaaggaatccctcgttcttcaggtaagtgtgttgacagaccaggtggaggctcagggagagaagattcgggatttggagttctgtcttgaagagcacagagagaagctgaatgccactgaagaaatgctgcagcaggagcttctgagtaggacctccttagagacacagaagctggagctgatggctgagatctctaacttgaagttaaaactgacggccgtagagaaggacaggctggattatgaagatcggttcagagacacagaggggctaattcaagagatcaatgatttgaggctaaaagtcaatgaaatggacggtgaaagacttcagtatgaaaagaagctcaagtcaactaaagacgaattggcatctttaaaagagcaactggaggagaaggaatgtgaagtaaagaggctgcaggagagactggtttgtaaggcgaaaggagaagggatcgaagtcctcgatcgagacattgaagtacagaaaatgaagaaggcagtggagtctctgatggcagcgaatgaagaaaaggagcggaaaatagaagacctgcggcagtgcctgagcaggtacaggaaaatgcaggacccagcagttctggcccaaggtcaggatagtgagtgtgagggcctgttccattccagctctatctccaccctgttggatgcacagggttttagtgatctggagagaagcacttcttctacgccaggaatggggtctcccagcagggacctgctccacacgagtgctccagaagagtttcacaccagcgtcttgcaagcttcaatcccttcactattgccgccatctgtggatgtagacacttgtgaaaaacccaagttgcctaccaagcccgagacttcatttgaagagggtgacggaagagcaatcctgggcgctgccgctgaagtctccctgagtgatggtgtttcaacttcaagtctgcagaaatctagcagccttggaaatctgaagaaagaggcatcggatggcacggataaagctccgactgacagccgcacgtttgggaccctgcctcccaaggtcccaggacacgaagcctctgtggatgacaacccctttggcactcgcaaagccaggtcctcatttggccggggcttttttaaaatcaaaagtggaaagaggacagcaagtgcacccaaccttgctgagacagaaaaagagacagctgagcacctgaatttggctggtacatctcggtcaaaaggttcccagggaaccagtccattcccaatgtctccaccatctccagattccagaaagaaatccagaggcatcatgagactctttgggaaacttagaagaagtcagtcaactacattcaacccagatgacatgtctgagcctgaattcaaaagaggagggacaagggcaactgcaggacccaggcttggttggtctcgagatttaggacagtccaacagtgacctggatatgccatttgccaaatggaccaaggagcaggtgtgtagctggctggcagagcaaggcttggggtcctacctgagttctggcaagcactggattatatctggccagacccttttgcaggcttctcagcaggatctggagaaggaacttggcatcaagcattcactgcatcgtaagaagctccagctggccctgcaggccctgggatctgaagaagaaaccaactatgggaagctagacttcaactgggttactagatggctggatgatattggcctccctcagtacaagacccagtttgatgaagggcgggtggacggtcgaatgctgcactacatgactgtggatgacctactgtccctgaaggttgtcagtgtgctgcaccatctcagtatcaaaagggccatccaagtgctgaggatcaataactttgagccaaactgtctaaggaggcggccgtctgatgagaatagcatcaccccatctgaggttcagcagtggaccaatcatcgtgtgatggagtggcttcgctctgtggacttggcagaatatgcccccaatctcagaggcagtggtgtccatggagggctcatggttcttgagcctcgttttaatgtagaaactatggcccagttactgaacattccaccaaataaaaccttgttgcgcagacatttggcgacccatttcaaccttctgattggtgcagaggcccagcaccagaagcgagatgccatggagttaccggattatgtactgctaacagccactgccaaagtgaagccgaagaagctgacctttagcaactttgggaatctgaggaagaagaaacatgaagatggagaggaatatgtttgtccgatggagctaggccaggcatcaggtagctcccagaaggggtttagacctggcttggacatgcgcctgtatgaagaggatgatttggatcggttagagcagatggaagattcagaagggacggtgagacagataggtgcattttctgaaggcatcaacaatctcacgcacatgttaaaggaagatgacatgtttaaggattttgctgcccgctccccgagtgccagcatcacagatgaagactccaacgtttgagcagagcacctgggcaaatgccaggagcacagatgtcattttctaacttggtttctcggatagtgaatacaggtgacaggttgtgcattgtttattgtttggtcttctgctcactcagaaggagaactgtcacacggaaatggtgccagttctgaggatactgagaaaaaagacactggtgaacggaagtgcgcttgctctgcctctatttaatgtaaagtctgtgacatatgttgcatttacgattgggtgtttaccagagtgcttcgctcacatccccaggagggaggatctggccacatcagtgttcactgcagccgtctgagcggaaagagctgctccccagatccaaggccaccatgccagcagcacctccacttgcctctcactgtcttatttttatatatttttctaaatacgtgtatatatacagtatacagaaagcagaacctttattttgtgacacaaggatcaaaagatcatattaaaacgaagaaaccccaatatttcaatgatcatataccagctgattcctgaagataccagagtcccattttttttccactgctgaattttaacagtgttaccattcaggctaaattctacttgataaacttctttggctcccacaaaaattgctgagcagtttggagcttggactttaatcttgactccatttgctttataatgaagaattttagggtattaccacatcaacttgaagcctttggatgcactcatatacccatcagaaaagtttttgttagaataactttggaaaaacaaaaaaacaaacagaacctttacatcttaagtttctttttttttccctttgctaaactcatcattatgttgaactaaggagtcctgcctagccatgtcgattgtaccttacactcagactgtcagctgatggggcttcgtattatttcaatcagaacccaaatattttaaagctgtagaacattttctaatggctatcctgtccaacagcaggttgctcatgttttctgtcacacagggcccaaaggctttttgtaaagaaaatagaaagctacaaagcagctgttgagtggtatgtgtctatgagtgttttcagcagggttggagacaatctacttttcattcagggctactctaaatgagatcccctgtgttctggacaggagcttagacactgggggacaggtggacaggtcactttacagtgatagatctggtgatagctatttccaaatgtcagcagtatgccgtttttatgctctgcaggttataaagctgttcattgtgaaccttgtaacactgctggttatttctaattaaattatcagatgctaacatgctcccattcatgatttcatgacaatattggcttcttcctgtattggggttttagtttaacatgaataaataccaccatttgaaagctcagtttgttattagaacctggttaaaataccagcagactgttacagatgccaaatattctttatcaaggacaatgtaacaactgatgatatgtgataaagttaaaaacttttgattatatattttatttacaaaagtattatgcaaagtttgcattaccttatgagaggaaataaagtcaattgataattaaaaaaaaaaaaaaaaaa

SEQ ID NO: 333 - DNA, 898 bp, Mus musculus
ggaccggccgccagccacgacttttttttttttttttttccggccggcctgctcctccgcctcggccccgggaccccggctccctgccagccccggccccggcaccatgtcggagaagagcgtggaggcagcggccgagctgagtgccaaggacctgaaagaaaagaaggacaaggtggaggagaaggccggccggaaagaacggaagaaagaagtagtggaggaggaggagaatggagctgaggaagaggaagaagaaactgcagaggatggagaggatgatgatgaaggggatgaagaagatgaggaagagaactgctgaagaggaggatgaagcagaccccaagaggcagaagacagaaaacggggcgtcggcatgaacccctgcccgtgggcttggggatgggaggcccctcaggtcctggaggtggggcgggaacacacaaatccagccccctttctcctggctccctgctctggccctgccccagagctgtgacccttgtcctttgacccagcctctcatttccatctctccagacactgctccttcaccctcactgccaccggtccagctcctgacccgcctcatctgagctccccagccagccctcacttgccctagcattcttgttcttctttcctgccttccctcaccatcccatatgttccggtccctgcgaagcctctccttgccctctacaccccgagcctctcagcctgcccttctttctcctgcctgacccctgggtctccctcagattccctcctctcagacagcgccaggccggggtggggctggggttggggccaagccccgaagctgccccctcccctttttgtataatttaataaagaaacggtcgcgcttctgtttttaaaaaaaaaaaaaaaaaaa

SEQ ID NO: 334 - DNA, 4238 bp, Mus musculus
  misc_feature (2540)..(2540): n is a, c, g, or t
ctcgcaccgccgactctccgctcgttcgccgccagccacgacgcccccgccgagccgcgcctcagccagccggcgcgggcagggaaggagccactcattttcggggctataattgtttatagaagtgaagagtttctaaagaaggtaacaaacaagaaaaagaaaatgccgaagccaatcaatgtaagagtaactacaatggacgctgagctagaatttgccatccagcccaatacaactggcaaacaactttttgaccaggttgtaaaaacagttggcttacgtgaggtctggttttttgggctgcaatatgtagacagcaaaggatattctacatggcttaaattgaataaaaaggtaacacagcaagatgttaaaaaagaaaatcctttacagttcaagtttagagctaaattctttcctgaagatgtttctgaggaattgattcaagaaataacacagagacttttcttcttgcaagttaaagaagccatcttaaatgatgagatatattgcccaccagaaactgcagttcttttggcttcgtatgctgtccaagccaagtatggagattataataaagagattcacaaaccaggctatctggctaatgacagactcttaccacagcgtgttttggaacaacacaaactgaccaaagagcagtgggaggagagaatacagaactggcatgaggaacacagagggatgctaagggaagattcgatgatggaatacttgaagattgcgcaagatctagagatgtatggtgtcaactactttgaaatcaagaataagaagggtactgagctgtggctaggtgttgatgccttaggcctgaatatttatgaacatgatgacaagttaacacctaaaattggttttccctggagtgaaatcagaaatatttcatttaatgacaaaaaattcgttataaagccaattgacaaaaaggcacctgattttgtcttctatgcacctcgtctgagaatcaataaacgaattttggccttatgtatgggaaaccatgaactgtacatgcgaaggagaaagcctgatactattgaagtacagcagatgaaggctcaggcccgggaggttttgcatcagaagcagctagaaagggcacaattagagaatgaaaagaagaaacgagaaatagcagaaaaggaaaaggaaagaatagaacgtgaaaaggaagagctgatggagcgtctgaggcagatcgaagagcagacagtgaaagcccagaaagaactagaagaacagactcggaaagctctagaactggagcaggagcgccagcgagcaaaagaggaggcagagcggctagacagggagcgccgggctgcagaagaagccaagtctgcaatcgccaagcaagctgctgaccagatgaagaaccaggagcagctggcagcagaacttgccgaattcactgccaagattgcacttttagaagaagccaagaagaaaaaggaagaggaagctactgagtggcagcacaaagcttttgcagctcaggaagacttggaaaagaccaaagaagagctaaaaactgtgatgtctgcgccacctccacctccccctcctccagtcatccctcccacggagaacgagcatgacgagcaggacgagaacagtgcggaggccagcgccgagctgtccagcgagggggtgatgaaccaccgaagcgaggaggagtgggtcaccgaaacccagaagaatgaacgcgtgaagaagcagctccaggcattgagttcagaattagcccaagctagagatgaaaccaagaagacacagaacgatgttcttcacgctgagaatgtcaaggccggccgtgataagtacaagacccttcggcagattcgacaaggcaatacgaagcagcgcatcgatgagtttgaagccatgtgagagctgttcttgtgatccatgtccttcataagctgaaccaccaccagagaaaagcaggcctgtgcagtgcagatgcaatggaacgcatcccaccttgccaaagcactcataccagtcgactgtgctcactagcaggacactgaagggtgtccttcatcattaaggcagtgtgatgtcatgtttggtcatttttcttttgtccagggaatggataatgacattctgtcacccacccttttgtacatttttcactttttgtttgtttcatctttttcagttgaatattaatactaatggccacgtctgacaaatgtgtgtatgtgctttgagcactgtgtacatcttaggataatggtggacatttcagtgcatgtttagctaatgaacttagttttctttgccctttccatgttgtaggctacatacatctccatgttcattctcatgttttttgtcagtgtgaccttctcatgcccagacatgatagagctgtaattctggtgtcacacggatcacttactggaggtgtataatatgagatagtgaggtcagacagaccacagacaagacatgggactacatcataagatgattagaatgttggacatcgtagtatgcagccngtggttagttattacaaagatcccttagttactgtattgtttgctttccttaagtgcagtcatctctgatagcttgagtccttaagtgcagccatctctgatagcttagtgatggttttcacgtcctgtagtcctatggtggctttccttgcctgttactttagagtctagccactaggagtcgcttctaagaaaattattgatgaagtggccttgtaagtacatggtctctgaaaaaaattcaagttttcttgttaggatgtggaatagaagataacttggatgataactaattctaagttgttgaagggggaaaaaaacccaaaccttggcctttctgcaagggcagcatatggaaacatcaactctgagaacaaaatactacctcactctttacgtacgtggtgactgttcgcacagtctgtgctgcatgtctgtcacccatacgcagtctcaatcatggccttcactgagtgcttttgagatcccagtgctaatgttttaactgcctttctgttgaactgtggggctctgatttgtgtctagattattgtatattctcactggtatgctgttccctggggggtgttctgtgtccgacgctgagtgaccctttgtgagaaagacgttgcctttgcagtacatgaagcatcccattcttcgttcttgatgggatagggatcgttattgtagcatatttggtttctaaatcactgcttatttttatttgcaatctctaaaacaaaattttatttcaattacgtcttactgaagaagtctttccagctagaaagatgttctgacactgtctgatcgtgaagcacctgaatttacagaagatgcagaagcctcgttttctctgcgtggttgagctactttccatttggtattatgcactcaaacttaacattaatctattaaaattgccattttattaagcaattttcacgcacagtagattcaacttgttttttgtgctgttttttgatttttgctgacttaaaaaggattaatttgggcagacattataaaaaggaaagggttaatatatttttggactctgtaggacaaaagagaactggttaaccttgaagtgactgttgtacagtggctgtgcacgtgcttcagactcatttgcgagggaatgctttctgtatgagagggagacggtaggccttaccactcagacctggacgtataagtgctcacttttccaacacatcacagcgatagtccttattgctaaaggacttggcttccctcggagttttactgatttatttttttctctttgcattgtgtacattatcattgctacatcagttgttacagtgttgaaaggctaccagttatatttgctgttaatagtctatttgtagattaggattaaagtgggtttaatccatttttatagctgtatgaatttttctaaacaggaacagccatttgcaaaatgggttttcatagtgattgcatcaattataacatttatcattagcagttgagagcacatgttcatatagcaatgtaaaaacctactaatgagtatttggtaatttcccattagcataattttatgttgtacaagtaaattacaattccatctctaatcttggataatactggttggttaacaataaagtgacaaaagctcccgccttgcaaaaaaaaaaaaaaaaaaaaaaaaaaaaaaaaaaa

SEQ ID NO: 335 - DNA, 3420 bp, Mus musculus
ccacgcgtccgggtaaagttgggagcgcagcggcgttggcggcggcggcggcggcagcggcaacgcggcggggccggtattcttccttgtaaatactgttatttgtatatactgtaaatgatgacgtcggtgggcactaaccgagcccggggaaactgggaacaacctcaaaaccaaaaccagacacagcacaagcagcggccacaggccactgcagagcaaattcgacttgcacagatgatttcggaccataatgatgctgactttgaggagaaggtgaaacaattgattgatatcacaggcaaaaaccaggatgaatgtgtgattgctttgcatgactgcaatggagatgtcaacagagccatcaatgttctcctggaaggaaatccagacacgcattcctgggagatggttgggaagaagaaaggagtctcaggacaaaaggatggtggacaaactgaatctaatgaagaaggaaaagaaaatcgagaccgggacagagactatagtcggcgacgtggtgggccaccaagacgggggagaggtgccagccgtggacgagagtttcggggccaggaaaatggattggatggcaccaagagtggagggccttctggaagaggcacagacagaggcagaagaggccgtggccgtggcagaggtagttctggtaggcgaggaggaaggttttctgctcaaggaatgggaacctttaacccagctgattatgcagagccagccaacactgatgataactatggcaatagcagtggcaatacatggaacaacactggccactttgaaccagatgatggaacaagtgcatggaggactgcaacagaagagtggggaactgaagactggaatgaagatctttctgagaccaagatctttaccgcctctaatgtgtcttcagtgcctctgcctgcggagaatgtgacaatcactgctggtcagagaattgaccttgctgttctgttggggaagacaccatcttcaatggagaatgattcatctaatctggatccatctcaggctccttccctggctcagcctctggtgtttagtaattcgaagcagaatgccatatcacagcctgcttcagggagtacattttctcaccatagcatggtgagcatgttggggaaaggatttggtgatgttggggaagctaaaagtggcagtacaacaggctcccagttcttggagcaattcaagactgcgcaggcccttgctcaactggcagctcaacattctcaatctggaagcactaccacctcctcttgggatatgggctcaacaacacaatcaccatcactggtgcagtatgatctgaagagtgcaaatgattcaacagtgcacagtccttttacaaagcgccaggcattcaccccatcttcaaccatgatggaggtattccttcaggagaagccacctgcagtggctacctcgacagctgcaccacctcccccgtcttctcctctgccaagcaaatccacctcggctccacagatgtctccggggtcttcagacaaccagtcctccagccctcagccggctcagcagaaactgaaacagcaaaagaagaaaacctccttgacgtctaagattcctgctctggctgtggagatgcctggctcagcagatatctcagggctaaatctacagtttggggcattgcagtttgggtcagagcctgtcctttctgattatgagtccacccccaccacgagcgcctcctcaagccaggctcctagtagcctgtataccagcacggccagtgagtcttcatctacagtttcatctaatcagagtcaggagtctggttatcagagtggcccgattcagtcgacaacttatacctcccaaaataatgctcagggccctctatatgaacagagatccacacagacgcggcggtatcccagctccatctcttcatcaccccaaaaggacctgactcaggctaagaatggttttagctctgtgcaggccacgcagttacagaccacgcaatctgttgaaggtgctacaggctctgcagtgaaatctgaatcaccttccacttctagtataccctctctcaatgaaacagtacctgcagcttccttactgacgacagccaatcagcattcatcctccttaagtggcttgagccatacggaggagattccaaataccaccaccacacaacatagcagtgcattatctacacagcagaataccctttcttcatcaacatcttctgggcgtacttcaacatccactcttttgcatacaagtgtggagagtgaggcaaatctacattcttcctccagcaccttctctaccacatccagcactgtctctgcacctcccccagtggtcagtgtctcctccagtctgaatagtggcagtagtctgggccttagcctgggcagcaactctactgtcacagcctcaactcgaagctcagttgctacaacttcaggaaaagctcctcccaaccttcctcctggagtcccgccattgttgcctaatccatatattatggctccggggctgttacatgcctatccgccacaagtatatggttatgatgatttacagatgctccagacaagatttccattggattactacagtatcccgtttcccacacccaccactccacttactgggagggatggtagcctggccagcaacccttactctggcgacctcaccaaattcggccgcggggatgcctcctccccagccccagccacaaccttggcccaaccccaacagaaccagacgcagactcaccacaccacgcagcagacattcctgaacccggcgctgcctcctggctatagttacaccagcctgccatactacacaggggtcccgggcctccccagcaccttccagtatgggcctgctgtgttccctgtggctcctacctcttccaagcagcatggtgtgaatgtcagtgtgaatgcctcggctacccctttccaacagccaagtggatatgggtctcatggatacaacactggtgtgtcagtcacctccagtaacacgggcgtgccagatatatccggttctgtgtactccaaaacccagtcctttgagaaacaagggtttcattccggtactcctgctgcctccttcaacttgccttcagccctaggaagtggagggcccatcaatccagccacagctgctgcctacccacctgccccctttatgcatattctgaccccacatcagcagccacactctcagatccttcaccatcacctgcagcaggatggccaggatatcctcactctcgtcgatgaccagcttggtgaataagtattaccgtaccaactggggcctcttctagcaggctcgaaggctgtggaataaagtgaaatctttgccctttaaaaaaaaaaaaaaaaaaaaaaaaaa

SEQ ID NO: 336 - DNA, 356 bp, Mus musculus
atcgtgaagcagatgaggatcctgcatgttaacgggtttaacggagagggcggcgaagaggacccgcagctgcaaggagcagatggcgatggtgagaaggccactaaagtgcaggacatcaaaaacaacctgaaggaggccattgaaaccattgtggccgccatgagcaacctggtgccccctgtggagctggccaaccctgagaaccagttcagagtggactacattctgagcgtgatagaacggccgaactttgacttcccacctgaattctatgagcatgccaaggctctgtgggaggatgagggagtgcgtgccagctacgagcgctccaatgaataccagctcaatgactc

SEQ ID NO: 337 - DNA, 1278 bp, Mus musculus; identical to SEQ ID NO: 141

SEQ ID NO: 338 - DNA, 4665 bp, Mus musculus
gtggaggatcgagcgctgttctcgctctggagccgctgcacatctcggaattattctcagcttattcactgtgcaagaaaaaaacaaattacatccataattctactgaactggaatcatagacgctgccatatatgtcacagtacactgaaaaagagccatcagtaatggatcaagaatccagcaaggctgcttggcctaaaccagcaggaggatatcagactatcacaggcaggagatatggaagaagacatgcgtatgtcagttttaagccatgtatgaccaggcatgaaagaagcttgggtcgggctggtgatgactatgaagtgttggaactagacgatgttccaaaggagaacacctcaggttccagttcattggatcaagtccatcctgctttaccaaatgaacctacagttgaaaaaagtgaaacagaaatttctacttgtggtccagcactgaatcaaagcactgagagcagtccatccattgccacagtatgtcatagtgaggaagtcagggagaccttagaaagcaatacaaaccttcataatcgcactgagacagagcatactccagcagtttgtaatgtctcaagtgtccagaatggaattatgttggttcatactgactcttatgatccagacagcaagcatgatgagaatggctctcttcaacttggcgctgaagctgtggaaggtggtagacatcagaaggggttaggccgtgcagtctttgagctggaaaatggagaggcagagatctacgctgacctgtcaccatcagtcccctctctcaacggtgaaataagtgaggcgtttgaagagctagattcagcacctttagagaaaagttctactgccgatgctgagcttgtccatcagaatgggcaggaatttcagaggtcttctgaagatggcgttgttagaaagaggcgacaagacgatactgatcagggaagacagacagaaaattcaactgaagatgcagactgtgctccaggccatgttgagcaaaatactagtgatagagccaaccaccatggaagttctcctgaacaggtagtaaggcccaaagttagaaaagtgataagttcaagccaggtggaccaagaaattggttttaataggcacgaggctaagcagagaagcgttcagagatggagagaggctttggaagtggaggagtgcagttcagatgaccctataataaagtgtgacgattatgatggagaccacgactgcatgttcctaactccaacttactcaagagttacacaaagggagacagaacggaatcgtgtaacatcagaaaatggagctacagcttcaggacggcaagaatctcgggacaatgccttttggaatgcctgcggagagtattaccaactctttgacaaagatgaagacagttcagagtgcagtgatggggaatggtctgcttctctgcctcaccgattttctggcacagaaaaagaccagtcctcaagcgatgacagctgggaaactctgccaggaaaggatgagaatgaccctgagctgcagagtgatagtagtggccccgaggaagaaaaccaagagttgtctcttcaggagggggaacagacatccttggaagagggagagatcccttggttacagtacaatgaggtcaatgagagcagcagcgatgaagggaatgagcctgccaatgagtttgcacagccggaagctttcatgttggatgggaacaacaaccttgaggacgactcgagcgtgagtgaagacttggatgtggactggagcctgtttgatggttttgcagacggacttggagttgctgaagctatttcttatgtggatcctcagttccttacctacatggcactagaagagcgcttagcccaggctatggagactgcgctggcacatttagagtcccttgcagtagacgttgaggtggccaatccacctgccagtaaggaaagcattgatgggcttccagagactctggttctagaggaccacaccgccatcggccaggagcagtgctgtcccatctgctgcagcgagtacatcaaggatgacattgccacagagctgccttgccatcacttctttcataagccctgtgtctccatctggctacagaagtccggaacatgccctgtgtgccgccgtcacttcccacctgcagttattgacgcatctgcagctgcttcctctgaccctgaccctgatgcctcgcctgcaaatgacaatgctgaagaagccccataaaccatcacgtggaaatgagatcaaaatcctacacagtaaatctgcaaattccttctaaatctgatgtgcaaataattatatataaatatatttaaaatgctctatatagtatatgccatagtttaggaagagaatattaccctttctaaactgaacttaggtttgcagaacacactaaacatttccagctgagtgttgaagccgtgcatcccttttcttcggttgaccatggtgttgattgtgacgtcagcagtcatctctgtggcacacctttcccttttgtctaaagtgctgccactaagagatcatccttacgctcccttcccacatgagatgtgaagactgtggtcacaacagtagtagtacaacttggtttcattgaaaataaactgaattctaaagcatgctttctcactggtccctttgcttttgctacatcgaaacctcttggtttataacaatactgagaaggttaagattggagcttttcagaatgccaaacaaagactaaagttttgaccagaacaccaaaaaataaaaaaataataataaaaatacatcttggatgtaaacctcctgaaatggtcacgtaataaactcttcagtgagcactggatgtgtttaacggcgagtaaaacatgtgaataatcggatgtgctccatgcatggcacagttcatggtttggccttatgaagcactgtctaagccccgatccagtctgcttctacttgttaaatacttgaaggtccaggacactcttgacatgtttgtttaagaagttggatatagttagcttaaagtagtttgggttctactttagaaggtctgaaggtttgcacatggtcatgttcataactatatcacccccataagaggtgcacagcttttaggtgatcacaggagtgggcaagtgtgtatagacatcggtgtaacgggtcgctcacgagtgaaaccagacatcagcactggggaacaatggcttagacggcatagagcgagtgtgcacccacctgctcctctgctcatagtgtcgggaatgtttatgtagcttccgaaatgcagtttcatttaatagctctgtgtaatatctctgagcattttatattctttctttttttccagtcttaaaaataaatgaattttcacttttggcacatttgaggcttaaatataagaaacataacacttgctttctgatttttgcatatattgtaaatgtggctggtatttacagcaaatactgtgtatccttttatgggtaaaacacaagtgaacattgcatgcaagtaatgtggtgaatttgtaatttagaggttttctggggcttctgtgactttggatgcttaaattgaggccttaatgttgctctagctagcatgtttcctcctgatgtatatagtcagcgttgtataaactaatctctgcttgttttctactctgtgatctttccataccgtatttcattgatcagttagtgtcagaagtcataccagagtaacattagttcctatgtgtatactgtggatatttgtgaattgtgtggtttgtttgtttgttttcttttatgtactgttgactagttatggcacttactgattaaacttacactgctgcagattgctgtgtaacaagccacatgttatgtttagtcactattatgggaccttggtttttcttctagatagcagctgtcccaaagaaaatatttcttctttgcctattaagatgtagctattatctgccagttgttaaaggggtttggttccaaactcaaccagagagttgaacgtaagaaagctgttgtactttttgcttcccatctgttaccgtccctcactgttggctccttactacgcatacacagctgctgtggggagaaagctgaatgagacttgtttcaatttttttagaaaagaaaatgaagttttaggactttcatggtaacaaacctgacaagttcagaccccagtatattatttgatcttatcttggatccttttgaaaagttaagaatatatgaaggtaaattagaaatagtgaaaatattgataaaatgtcatttatcttatttctctattttatgttgttacttggcctattaattttaattttttgaacattttcttatttctcgtatgtgaatgctgatatttaaagttcaactcatgtggatttcttttgtgtttcttagttgttatctctaagctaactaacttttaagattatttgtgatatggatttatatataagctgttaaatatatatgaactgttaaaacggaatgcaaggttttcaaaagcccaggtctaactgtgatgattggtttattggtctacaatcccagcctggcattttccgtgtaaatcataaacaataaacaggatatactcggtgttcatttctaat

SEQ ID NO: 339 - DNA, 1812 bp, Mus musculus
cggagctaacggttgtctgcggccgtagtgagctttgcttcgtttcctgaagatggagggtcctttgtccgtgttcggggaccgcagcactggggaggcgatccgctcccagaatgttatggctgcagcttctattgccaacattgttaaaagttctcttgggccagttggcttggataaaatgttggtggatgatattggtgatgtaaccattactaacgatggtgccaccatcctgaagttactggaggtagaacatcccgcagccaaagttctgtgtgagttggctgacctgcaagacaaagaagttggagatggaactacctcagtggtaatcattgcagcggagcttctgaaaaatgcagatgagctagtcaaacagaaaattcatccaacatcagttattagtggctatcgtcttgcctgcaaggaagcggtgcgttatatcaatgagaacctgattattaacgcagacgaacttggaagagactgtctgaccaatactgctaagacatccatgtcttccaaaattattggaataaatggtgattactttgctaatatggtagtagatgctgtgcttgctgttaaatacacagatgccagaggccagcctcgctatccaatcaattctgttaatattctgaaagcccatgggagaagtcagatagaaagcatgctgatcaatggctatgcgctcaattgtgtggttggatctcagggcatgcccaagagaatagttaatgcaaaaattgcttgtcttgacttcagcctgcagaaaacaaaaatgaagcttggtgtacaggtggttattacagaccctgagaaattggaccaaattagacagagagaatcggatatcaccaaggagagaattcagaagatcctggcaactggtgccaatgttattctaaccactggtggcattgatgatatgtgtctcaagtattttgtggaagctggtgccatggctgttaggagagttttaaaacgagacctgaagtgtgttgcaaaagcttctggagcaactatcctgtctacgctggccaatttggaaggcgaagaaacttttgaagtgacgatgttgggacaagcggaagaggtcgtacaggagagaatttgtgatgatgagctgatcttaatcaaaaatactaaggctcgtacatctgcttcaatcatcttacgaggagcaaatgatttcatgtgtgatgaaatggagcgctctttacatgatgctctttgtgtggtgaagagagttttggagtcgaaatctgtggtcccaggtggaggtgctgtagaagctgccctgtccatatacctggaaaactatgcaacaagcatgggatctcgggaacagcttgctattgcagagtttgcaagatctctgcttgtgattcctaatacactggcagtgaatgctgcccaggactccaccgacctggttgccaagttaagagcttttcacaatgaggctcaagtgaacccggaacgtaaaaatctaaagtggattggtcttgatttggtccatgggaaaccacgagacaacaagcaagcaggggtctttgaaccaaccatagttaaagtgaagagcctgaagttcgcaacagaggctgcaatcaccatccttcggattgatgatctgataaaattacacccagaatgcaaagacgataaacacggaagttatgaaaatgctgttcactctggagcccttgatgactgattggatttccctgttatttataacagtgtcaggtgcaatgccgtagccttgggtgtctcacattaaagtacagcaagctgtccacctgg

SEQ ID NO: 340 - DNA, 3873 bp, Mus musculus
gaatcactaagagtgaggctgaaaggtggctgttctctacgcttatcggccgcccggctgcttgtgaagttccagcctcatggcggagataattcaggaacgtatagaagatcgaatcccggagttggaacagctggagcgcatcggactcttcagtcacgcggagattaaggctatcatcaagaaggcttccgacctagaatacaaaatacatcggagaacccttctcaaggaagactttatcaactatgttcaatatgaaattaatcttttggagctgatccagagaagaagagcaagaattaaatattcatttaagaaggatgagattgaatattctatggtacatcgggtccagggtgtctttggtcgtgcttcagcgaagtggaaagatgatgttcagctctggctctcctatatagttttctgtaagaaatggggcaccaaaactcaccttagcaagatattctctgccatgcttgccattcactcaaacaagccagctttgtggatcatggcagccaaatgggaaatggaagaccgcttgtcttcagaaagtgccaggcagttatttcttcgagctctacgctttcatcccgagtgtccaaagctctatcaagaatactttaggatggagctgatgcatgctgagaaactgagaaaggagaagcaagaatttgaaaaagccgccatggacatgggggattttgatcatcctgaagaaatccttaaaggcgagttggcacggatcatttataaaaattctataagcaagattaaaggtgcagaattccatgtgtcacttcttgctattgctcagctatttgattttgccaaagatctacagaaggaaatttatgatgaccttcaagctctgcacaccgatgacccactcacttgggattatgtggcgcggcgagaattagagatcgagtcccaaccaggtgaagaacagcctgtgtcgaaacaagccaaagcagtggaaatgggccgaagggaagagaggtgctgcgcggtgtatgaggaggcagtgaaggccctgcctacagaggccatgtggaagtgttacatcaccttttgcttggagaggttttctaagaagaccagtagtgtgcccctcagagggcagaggctggaaagaaccatgcttgcattcaggaaggcccatgaactgaagctgctttctgaagtccagtacaagcagtggattgacttgttgctgcgccaggacctcttcaaagaagcactgcaggtggcagaggctgggaccgaattgttcaaggactctgtaacaatgtggcagacgaagctccaggtgctcattgactcaaagagcccggatgtagagatgcgctttgaggaagcctttgcacacctcaaaccccaggtttgtctgcccttgtggatttcttgggcagagtggagtgaaagtgctaaaagccaggaggacacggaagccatctttaagaaagctattatagctgtcacaggtgccagttcagtaactctgaaggagaaatacctggattgggcctatcggagtggaggctacaaaaaggccagagcagtgtttaaaagtttacaggaaagccgtccattttcggttgagtttttcaggaaaatgatgcagtttgaaaaggagcaggaaccctgcaagatggtaaacctgagggagtattacgagagggcgctgagagagtttgggacttcagattctgatctttggatggattacatcaaggaagaattgaaccatcccttcggtaaacctgagaactgcggacagatctattggcgagccatgaaaatgttgcagggacagtcagcagagctgtttgtagctaaacacgccatgcaccaggctggccactagtggtcgagcaccaccagttggctgaagttgtgatgcaagtctcggggcaggtttgtgatgagctggtgtgtgaattgtcgagagctggcagaagaacggattgatttttgtaacatacttttacttggtgttaatctttggttccagaaatgagtactgctagtgcctgttaaatctaaaatacacagaaatcatatgattcagcttcaattcttgttccaggctaagcatatacagctctaatctagactaggtgtgagggacccagttcaaacccaagagaaagtatagttttgtgtgttctcttcttgttgtgaaagcctgcatgatacctgtggagataggagggacgagggtgtggatggactgcctcaaccctccagctcccgaatactgattaagagactttatttatgaaagcttagtccttatggcttagccatgtttaccacctggctgatcacctctcctcagccccgtacattcaagttccaagtctggccggcagatctcccacctctcaattcttcccagagttccgatctcttcttggatgtcccacctttactctcctgcccagccatcagctgtttatcaaacaaatcagaagtgatagaggagaatgtgtacaatcttcgatgcaggtgatgcttcataaaaataacagtaccaaagtccggacagtactctactggttcaaaaatcaacactgaatactacaaagacagcctttacagtgcccaagattatcccaacactagggcagagcagagcagaaagtcacttagatcaccgaagtgaggctgaacagtgacttcttttcctgtatctgaattggatctgtacttttaaatcaatcattcaagaaatagcgccttccttcacctgcaggaaaaagggagacttggaagatgagtgacagagaaggaggcgctgggtattgggagaagtttgtcttttaagaaggttgaggtggcacaggaaacgatttaccccaaggatggacaggccaagaatggcatggaggatgcccagctttgtggcgggggagggagtgggaagtgcctcagtagggggtggaggggcagattggcacaaaggagggcatttggggagtaagggaggaagctgaaataaatcctttcattttttttgatactgggtatttgtttgtttgtgataaacctaaatttgcatttgaggcaagagctttaccactgagacagaccccaggcatctttttattttctgttttgagcaggtctcactaagttttggctggcctgaaaagttctcaggtctaggcaggccttgaactttgaatgctcttgcctcagcctctcaagtggctgaggttacaggcctcaacagctggaccttaacattttgatatcattgggaaagtattttgaacaagttacttaatagtaagccttaattaatattaagttcatttaataacatggaaaacacctaatgaattcatagcattcccttgtcttaattaatctcctgtggctatagttttttaaaagtataaacgatattggtgaagattcttgtcaatctttggttacattcactggcacttccttaggggacttacttgacagtggaattactgaattaggtaaaagaacaaaatttgccaatttgctctttccagcatcacatgcaggaggcaacgcccttgtctgcactggggattacgtacttccttttcatcattttataattcaccactcagtagatgaaagcggtacatcatcacttaagctactttttcttattaatttttgtcttaaaaatacattgagagagccaggggagatggctcagcggttaagactgactgctcttccagatgtcccaagttcaattcccagcaaccacatggtggctcacaaccatctgtaatgggatccgatatcctcttctggtgtgtctgaagacagtgtagtcatagacataaaatgaataaataaatctttaaaaaaacg

SEQ ID NO: 341 - DNA, 3849 bp, Mus musculus
gcggagcagaggaggcgagggcggagggccagagaggcagttggaagatggcggacgaggtggcgctcgcccttcaggccgccggctccccttccgcggcggccgccatggaggccgcgtcgcagccggcggacgagccgctccgcaagaggccccgccgagacgggcctggcctcgggcgcagcccgggcgagccgagcgcagcagtggcgccggcggccgcggggtgtgaggcggcgagcgccgcggccccggcggcgctgtggcgggaggcggcaggggcggcggcgagcgcggagcgggaggccccggcgacggccgtggccggggacggagacaatgggtccggcctgcggcgggagccgagggcggctgacgacttcgacgacgacgagggcgaggaggaggacgaggcggcggcggcagcggcggcggcagcgatcggctaccgagacaacctcctgttgaccgatggactcctcactaatggctttcattcctgtgaaagtgatgacgatgacagaacgtcacacgccagctctagtgactggactccgcggccgcggataggtccatatacttttgttcagcaacatctcatgattggcaccgatcctcgaacaattcttaaagatttattaccagaaacaattcctccacctgagctggatgatatgacgctgtggcagattgttattaatatcctttcagaaccaccaaagcggaaaaaaagaaaagatatcaatacaattgaagatgctgtgaagttactgcaggagtgtaaaaagataatagttctgactggagctggggtttctgtctcctgtgggattcctgacttcagatcaagagacggtatctatgctcgccttgcggtggacttcccagacctcccagaccctcaagccatgtttgatattgagtattttagaaaagacccaagaccattcttcaagtttgcaaaggaaatatatcccggacagttccagccgtctctgtgtcacaaattcatagctttgtcagataaggaaggaaaactacttcgaaattatactcaaaatatagataccttggagcaggttgcaggaatccaaaggatccttcagtgtcatggttcctttgcaacagcatcttgcctgatttgtaaatacaaagttgattgtgaagctgttcgtggagacatttttaatcaggtagttcctcggtgccctaggtgcccagctgatgagccacttgccatcatgaagccagagattgtcttctttggtgaaaacttaccagaacagtttcatagagccatgaagtatgacaaagatgaagttgacctcctcattgttattggatcttctctgaaagtgagaccagtagcactaattccaagttctataccccatgaagtgcctcaaatattaataaatagggaacctttgcctcatctacattttgatgtagagctccttggagactgcgatgttataattaatgagttgtgtcataggctaggtggtgaatatgccaaactttgttgtaaccctgtaaagctttcagaaattactgaaaaacctccacgcccacaaaaggaattggttcatttatcagagttgccaccaacacctcttcatatttcggaagactcaagttcacctgaaagaactgtaccacaagactcttctgtgattgctacacttgtagaccaagcaacaaacaacaatgttaatgatttagaagtatctgaatcaagttgtgtggaagaaaaaccacaagaagtacagactagtaggaatgttgagaacattaatgtggaaaatccagattttaaggctgttggttccagtactgcagacaaaaatgaaagaacttcagttgcagaaacagtgagaaaatgctggcctaatagacttgcaaaggagcagattagtaagcggcttgagggtaatcaatacctgtttgtaccaccaaatcgttacatattccacggtgctgaggtatactcagactctgaagatgacgtcttgtcctctagttcctgtggcagtaacagtgacagtggcacatgccagagtccaagtttagaagaacccttggaagatgaaagtgaaattgaagaattctacaatggcttggaagatgatacggagaggcccgaatgtgctggaggatctggatttggagctgatggaggggatcaagaggttgttaatgaagctatagctacaagacaggaattgacagatgtaaactatccatcagacaaatcataacactattgaagctgtccggattcaggaattgctccaccagcattgggaactttagcatgtcaaaaaaatgaatgtttacttgtgaacttgaacaaggaaatctgaaagatgtattatttatagactggaaaatagattgtcttcttggataatttctaaagttccatcatttctgtttgtacttgtacattcaacactgttggttgacttcatcttcctttcaaggttcatttgtatgatacattcgtatgtatgtataattttgttttttgcctaatgagtttcaaccttttaaagttttcaaaagccattggaatgttaatgtaaagggaacagcttatctagaccaaagaatggtatttcacacttttttgtttgtaacattgaatagtttaaagccctcaatttctgttctgctgaacttttatttttaggacagttaactttttaaacactggcattttccaaaacttgtggcagctaactttttaaaatcacagatgacttgtaatgtgaggagtcagcaccgtgtctggagcactcaaaacttgggctcagtgtgtgaagcgtacttactgcatcgtttttgtacttgctgcagacgtggtaatgtccaaacaggcccctgagactaatctgataaatgatttggaaatgtgtttcagttgttctagaaacaatagtgcctgtctatataggtccccttagtttgaatatttgccattgtttaattaaatacctatcactgtggtagagcctgcatagatcttcaccacaaatactgccaagatgtgaatatgcaaagcctttctgaatctaataatggtacttctactggggagagtgtaatattttggactgctgtttttccattaatgaggaaagcaataggcctcttaattaaagtcccaaagtcataagataaattgtagctcaaccagaaagtacactgttgcctgttgaggatttggtgtaatgtatcccaaggtgttagccttgtattatggagatgaatacagatccaatagtcaaatgaaactagttcttagttatttaaaagcttagcttgccttaaaactagggatcaattttctcaactgcagaaacttttagcctttcaaacagttcacacctcagaaagtcagtatttattttacagacttctttggaacattgcccccaaatttaaatattcatgtgggtttagtatttattacaaaaaaatgatttgaaatatagctgttctttatgcataaaatacccagttaggaccattactgccagaggagaaaagtattaagtagctcatttccctacctaaaagataactgaatttatttggctacactaaagaatgcagtatatttagttttccatttgcatgatgtgtttgtgctatagacaatattttaaattgaaaaatttgttttaaattatttttacagtgaagactgttttcagctctttttatattgtacatagacttttatgtaatctggcatatgttttgtagaccgtttaatgactggattatcttcctccaacttttgaaatacaaaaacagtgttttatactaaaaaaaaaaaaa

SEQ ID NO: 342 - DNA, 884 bp, Mus musculus
gtatacatcacataattcacggaaacacttctgaaaccttaggcttccatgtttatatcaaatctctgagagagacagtgcgctcatatgacgagattgtgctatttttcttcacaagtctttcatgtggacattgcagaaatccagttctcttagatggtacgtcctgtgagtataatcaagtagggtagctgagactgctaggccactgtgcttcttggcttagctaggtactgagcatactcctgttagtcgagctgtacagatgaaatattcctgtagtgcgcctaagttaaggccttattcccttctccttgagatttttatcagaaaatgtataaatggtaatatgagtggtctccccatctcacaaagatgacaaaaaatttgatttacaatgtgttctgtattttgaaatgagtatgtttatcttatataattctttgattgctattcatcagccagttcagtgcaaggaagggcagacttatagaagacttttattaactttgtcaatatgtcttgaggactatcgtcctctgtgttagttcaatcctttagatgttagtacagtgtttatgagaaaactgttactagaagctgaagaacagctcagtggcaaggaaccttccagcatgtgcaagaccctggggtcggtccttagtgctgaaaaaaagaaaacgaagtgactccgtcggtgttctgttctaagccttggagaatgaccttcatatttatagattctatgtcttatgtcttaaccagtcagtgataaaatccaggaaatgttttttaacaaaataaaattttgtttgtaacatgtttataataatataaacgtggatcttatacatgttcaataaaaagcagtatctcaaaatttt

SEQ ID NO: 343 - DNA, 4731 bp, Mus musculus
cggagcggggcatgcgggtgtcggagccaggcgggcacggctgcgggagctgctgacggcgctgcgggatcgggagccggtggcggcgcgcggggcagttcatcttctaagctgaaaaagtcttccatgaataattcacatttaaaaatcatatattcctagaagactgaaatgggggctgttattttgagggccctgaggttatgagtgtgcttccgccctatcatgcctcctgctatggcagacaaccttgacatctgggcagtggactcacagattgcatccgatggcgccatatccgtcgatttccttctgcccaccgggatttatatccagttggaagtacctcgggaagctaccatttcttatattaaacagatgttatggaagcaagttcacaactacccgatgtttaacctcctcatggacattgactcgtatatgtttgcatgtgtgaatcaaactgctgtatatgaggaactggaagacgaaacacgaagactttgtgatgtcagaccttttcttccagttctcaaactagtgactagaagctgtgaccccgcagaaaaattggactcaaaaattggggttcgtataggaaaaggtcttcatgagtttgatgccttgaaggatcccgaagtgaatgaatttagaagaaaaatgcgcaaattcagtgaggccaagattcagtctctggtagggttgtcttggatcgactggctaaagcacacgtatccgcctgagcacgagccgtccgtcctggagaacttggaagataaactttatggaggaaagctggttgtggctgtgcactttgaaaatagccaggatgtatttagttttcaagtgtctcccaatttgaatcctataaaaataaatgaattggcaatccagaaacgcctcactattcgtggaaaggaagatgaagctagcccctgtgactatgtgttacaggtcagtgggagagtggagtatgtgtttggcgatcatccactaattcagttccagtacatccggaattgtgtgatgaatagaaccctgccccacttcatccttgtggaatgttgtaagatcaagaaaatgtatgaacaagaaatgattgccatagaggctgccatcaaccgaaactcatccaaccttcctctccctttaccaccaaagaaaacgcgagttatttctcatatctgggacaacaacaaccctttccaaattaccttggttaaaggaaataagcttaatacagaagaaactgtgaaagttcatgtccgagctgggctttttcacggaaccgagctcctgtgtaaaaccgtcgtaagctcagagatatcaggaaagaacgaccatatttggaatgaacaactggaatttgatattaatatttgtgacttaccaagaatggctcgattatgttttgctgtttatgcagttttggataaagtaaaaacgaagaaatcaacaaagactattaatccctctaagtatcagaccatcaggaaagccgggaaagtgcattatcctgtcgcatgggtaaataccatggtttttgacttcaaaggacagctgaggtctggagacgtcatattgcatagctggtcttcgtttcctgatgagctggaagaaatgctgaatcccatggggactgtgcagacgaacccatatgctgagaacgccaccgccttgcacattacgttcccagagaataagaagcagccgtgttattatccccccttcgataagatcattgagaaggcagctgagcttgccagcggagacagtgctaatgtgtcaagtcgtggtggaaaaaaatttcttgctgtgctgaaagaaatcttggacagggaccccctgtctcagctgtgtgagaacgaaatggaccttatttggactctacggcaagactgccgagaaaatttccctcagtcactgccaaaactactcttgtcaatcaagtggaataaacttgaagatgttgctcagcttcaggcgctcctgcagatatggcccaaactgccccccagggaagccctggaactcctggatttcaactatccagaccagtatgtccgggaatacgctgtaggctgccttcgacagatgagtgatgaagaactctctcagtatcttttacaattggtgcaagttttgaaatatgagccttttctcgattgtgccctctccagattcctattagaaagagcacttgataatcggaggattgggcagtttctgttttggcatcttaggtcagaggtgcacactcctgctgtgtccgtacagtttggtgtcatcctggaagcatactgtcgaggaagcgtggggcacatgaaagtgctttccaaacaggtggaagcactcaataagttaaaaactttaaatagcttaatcaaactgaatgcggtgaagctgagcagagctaagggaaaggaggccatgcacacgtgcctgaaacagagtgcttaccgggaggcgctctctgacctgcagtcgccgctgaacccctgcgtcatcctctcagagctctatgttgaaaagtgcaaatacatggactccaagatgaagcccctgtggctggtctacagcagcagagcctttggagaggactcggttggagtgatctttaaaaatggtgacgatttgcggcaggacatgctgacgctgcagatgttgcgcctgatggatctgctttggaaagaagctggcttggacctgcggatgctcccctatggctgcttagcaacaggagatcgctctggcctcattgaggttgtgagcacctctgagacaatcgctgacattcagctgaacagtagtaacgtggctgccacggcagccttcaacaaagacgcactcctgaactggctcaaggagtacaactctggggatgacctggaccgagcgattgaggagtttaccttgtcctgtgctggctactgtgtagcctcttatgtcctcggcattggtgacaggcacagtgacaacatcatggtgaagaaaaccggccagctcttccacatagattttgggcatattcttggaaatttcaaatctaaatttggcattaaaagggagcgagtaccttttattcttacttatgacttcattcatgtcattcaacaaggaaaaacgggaaacactgaaaaatttggcagattccgccagtgctgtgaagatgcgtatctgattttacggcggcatgggaatctcttcatcaccctgtttgccctgatgttgactgcagggctgcctgagctcacatcggtcaaagatatacagtatcttaaggactcgcttgccttagggaagagcgaggaggaagcactgaagcagttcaagcagaagtttgacgaggccctcagggaaagctggactactaaagtgaactggatggctcacacagtacggaaagactacaggtcctagcgtccgccctactctgccgcacttgcctgttcgtttcctttccattttgcacttgcactattgaacatgaccctgccagaaatgcaaagggaatgaaatcctgaagctcagagtgaagttcaaaccacggcgtcccgcagagcctagtctgaaccaccccatgcccaccctgtgttcccgagcgcttccaggactcatcgtgagcagcagcatggaggccccttcctgctgaccttgcacgcgagggatgctactagggactgctggggatcttttctttctttccttcagtatttggtactttaccagagaggtgtacatacttcttttcagtgttgtgaccaagtgctgcgactcagccaacaacttaccacattcggggctgggagctgttctaagaaagggacctccctctcctttttaaattggtgagccacaaattacattgattatgttgaacttattattcttcaaagaaaatattttaaacctgtgaaaactcactaattttgttaatatttatcatgatggcatcatttcagccagactcgctgagaatctattggtggggcaaatataatatatatataatatatatatatatatatgctgcatatatatttataaaatttctagtgggagttctatataaaaagatgtttctttggtattcttcagcctgtgttttcaagttttacagaagcagagcttttccctaagttcctcttcggttcactgtagatccagttcttccagccgcttcagcactgaggcgccatgaatgcggtttctctgtgtagctctgagagttcgtttcatagaacacaacacttgagcagatgcatccaaggaggcgagcaaatgaaaaggaatctatttatggaataaactcgaaacctaaatttcagtattttagtaatatgccagctgttcttaatgtatttattaaaatgtataacaatgtgatttttcaatggtattagttcaaattgacgtggattcatgccacatggaaatctttaatttatttgttgaggtaccatatagccagggtgctaggtgatgagtggtgttagcatgtgcaataggaactactggtttgctgtgtaaatggatgtcaggatccagcaaaactactgctttcttctccaaagacatgtgggagccttcaatcctcagtggcatgggaaacagctgagtacttgccccgtgacttcagttttctataggaattttattaaagagtgtttaattttgttgtccttcttaatgttctcagtcaaataaatgggtggtttcatctgtttgggg

SEQ ID NO: 344 - DNA, 1966 bp, Mus musculus
ggctctccagcaggccccttgctcggcttccgccttctctcccggcgtcgctttctggaaggttcgtggaggaggcggtcagggagaccgttactccacagcaagccggaatccgtgtccatccgtcctcctgaacccgcgcagacgccaccaaggtcgccatgccggagaacgtagcttcccgaagcggggcgcccaccgccgggcccggcagccgcgggaaaagcgcctaccaggaccgcgacaagccagcccagatccgcttcagcaatatttccgcggccaaagcggttgctgatgctattagaacaagccttggacctaaaggaatggacaaaatgattcaagatggaaaaggcgatgtgaccattacaaatgatggtgccaccattctgaaacaaatgcaggtattgcatccagcagccagaatgctggtggaattgtctaaagctcaagacatagaagcaggagatggcaccacgtcggttgtcatcattgctggctctcttttagactcctgtaccaaacttctgcagaaaggtatacatccaaccatcatttccgagtcattccagaaagctttggaaaagggtcttgaaatccttactgacatgtctcgacctgtgcaactgagcgacagagaaactttgttaaatagcgcaactacttcattgaattcaaaggttgtctctcagtattcaagtctactctctccaatgagtgtcaatgcggtgatgaaagtgattgacccagccacagctaccagtgtagatcttcgagatattaaaatagttaagaagcttggtgggacaatagatgactgtgagctggtggaaggcctcgttctcacacagaaagtagcaaattctggcataacaagagttgaaaaggctaagattgggcttattcagttttgcttatctgctcctaaaacagatatggataatcaaatagtagtatctgactatgcccagatggatcgagtgcttcgagaggagagagcctatattttaaatttggtgaagcaaattaagaaaacaggatgtaatgtccttctcatacagaagtctatcctgagagatgcccttagtgatcttgcattacattttctgaataagatgaagattatggtggttaaggacgttgaaagagaagacattgaattcatctgtaagacaattggaaccaaaccagttgctcacattgaccagttcactgctgacatgctgggttctgctgagttagcagaggaagtcagtttaaatggttctggaaaactattcaagattacaggttgtacaagcccagggaaaacagttacaattgtcgtacgtggttctaacaaactggtgattgaagaagctgagcgctccattcatgatgctctctgtgtcatccgatgcttagtaaagaaaagagctcttattgcaggaggtggtgctccagaaatagagctggccctcagactgacagagtactcccgaacactgagtggtatggagtcctactgtgttcgtgctttcgcggatgctatggaagtcattccatctacactagctgaaaatgctggcctgaatcccatttctacagtaacagagctaagaaaccgccatgcccaaggagaaaaaactacaggcattaatgtccgaaagggtgggatctccaacattttggaggaaatggttgttcagcctctgttggtgtcagtcagtgctttgaccttagcaactgaaactgtgcggagcattctgaaaatcgatgatgtggtaaatactcgataatctggataaaaggatggttgactgcatcattatggacagaagtactgtggctggaatgaaggacaaccaccttgttccttgtctggaagcttcagagtttttggacattgtcttccagttggcatttgtttgaaattgtattgaaacaatttaatgaaaacattaaatacttggttttaaactcc

SEQ ID NO: 345 - DNA, 12097 bp, Mus musculus
atggccagccgtgcgcgcaggacagccaagttctccagcttccagccgatactcgcacagtcgcctaggctgctgctgctgctgctgctcctgtcactggtaagctacgtctccacacaggctgctggccccggtgcagcacttcagtccctgggtctctccgggacttcgggagtccctacagaggaagctatagtggtggcaaaccgcgggctccgtgtgcccttcggtcgcgaagtctggctggatccgttgcgtgacttggtgctgcaggtgcagccaggagaccgctgcacagtgaccgtgttagacaacgacgcgctggcccagcggccgggccacttgagtcccaagcgttttgcgtgcgactatggcccgggtgaggtgcgctactcgcacctgggtgctcgcagcccttcccgcgaccgcgtccgcctgcagctgcgctacgatgctccaggaggggcgatagtcctgccactggcactagaggtggaagtggtcttcacccagctggagattgtgactcggaatttacctctggtcgtggaagaactgctagggaccagtaatgccttggacgatcggagcttagagttcgcctaccagcctgagaccgaggagtgccgcgtgggcatcttgtcaggtctgagcgctttgcctcgttacggagaactccttcactacccacaggtccagggaggggccggagatagagggacctctaagacccttttgatggactgcaaagcattccaggagctgggagtccgctaccgccacacagcccccagccgctcgcctaacagggactggctgcctatggtggtcgagctgcattcgcgaggggctccagagggcagcccggctctaaaacgcgaacacttccaggtgcttgtgaggattcgaggaggagcggagaacactgcacccaagcccagtttcgtggccatgatgatgatggaggtggaccagtttgtactgactgctctcactccagacatgctagcagccgaggatgctgaatccgacccagaccttttgattttcaacctcacctctgccttccagcctgggcagggctacctggtgagcacggatgacagaagcctgcctctctcctcctttacacagcgggatttgcgcctgctgaagattgcctaccagcctccctctgaagactcggatcaggagcgtctgtttgaactagagctggagatagtggaccctgaaggagcagcctcagaccctttcgccttcatggtggtggtgaaacccatgaacacactggctcccgtggtcacacgaaacactggccttattctctatgagggtcaatatcggccgctcacgggtcccataggcagtggaccccagaacttggtcatcagtgatgaagatgacctagaagctgtgaggctggaggtggtggctgggctccggcatggccaccttgttattctgggttctcccagtagcgactctgctcccaagaccttcacagtggcggagctggcggctggccaggttgtgtatcagcatgatgacaaagacggttcactgagtgacaacttggtgctgcgcatgtccgatggaggaggcaggcaccaggtccagttcctgttccctatcactttagtgcctgtggatgaccagccgccggtcctgaacgccaacactgggctgacagtggctgagggggaaactgtgcctatcccacccttgactctcagtgcaaccgatatagattcagatgactctcagctggtttttgtcctgttgccacccttctcaagcttggggcacctgcttctccgccaaaggcatgtcccccaggaagagcagggtctgtggcagaagcaagggtcattttacgagcgaacggtgacagagtggcggcaacaggatataacagaggggaagctcttctataggcactcggggccccacagccctgggccggtgatggaccagttcatgtttagagtccaagacaatcatgatccccctaaccagtctgggatccagaggtttgtaatacgcattcatcccgtggaccgtctccctccagaactgggcagtggctgtccccttcggatggtggtacaggaatcccagctcacaccactgaggaaaaggtggctgcactacactgacctggacacagatgaccgagagttacagtacacagtgacccagcctcccacggacacagatgagaaccactcgccggctccactgggcacgttggtcttcactgataatccctcagtggtggtgagccattttacccaagcccaggtcaatcatcataaaattgcttacaggcccccagggcaggagctaggagtcgcagcccgagtggctcagttccagttccaagtagaggatcgagctgggaatgtggctcctggcaccttcaccctttacctgcagcctgtggataaccagccccccgagattgtcaacactggcttcaccgttgaggagaagggccaccacatcctgcgtgagaccgagctgcatgtgagtgatgttgacacggatgtgacccacatctcgttcactctcacacaggcccccaaacacggccacatgcaaatatctggacggccactgcatgtaggcggacaattccacttggaggacataaagcatggcagaatttcctactggaatagcggggatgagtctttgactgacagctgctccctggaggtcagcgacagacaccatgtggtgccaatcactctcagagtgaacgttcggccaggggaccgtgaaggtcctatgtcagtccttcctgctggtactctggagtcctatctagacgtcttagagaatggggctactgaagtcactgccaatatcattaagggggcctatcagggtaccgatgatttgatgctgaccttcctgttagaaggcccaccctcctatggggaaatcttagtcaacggagctccagctgagcagttcacccagagggacatcctggagggctctgttgtctacgctcacaccagtggtgagattggcctgttgcccaaagctgactcttttaacctgagtctatcagctatgtctcaagaatggagaatcggtagcagcatcgttcaaggcgtcactgtgtgggtgaccatcctccccgtggacagccaagcccctgagatttctcttggtgaacagtttgtagtgctggaaggtgacaagagtgtgataagcctgacccacctaagtgctgaggacatggactccctgaaggatgacctcttgtgcacaatagtcattcagccaacctcaggctatgtagagaacatttctccagcaccaggctcagagaaatcaagagccggggttgccataagtgccttcacgctgaaggatctcaggcaaggacacattaactatgtccagagtgtccacagaggagtggagcctgtcgaagaccgctttatattccgttgttctgacggtattaacttctctgagagacagatattccccattgtcatcattcctaccaatgacgagcagccagaaatgttcatgagggaattcatggtgatggaaggcatgagtctggtggtcaacagactcatcctcaacgctgctgatgccgacattcccagggatgatctaacgtttactattacccggtttccaactcacggtcatgtcatgaaccagttaatcaatggtacagtgttggttgaaagcttcaccctggatcagattatagagagttccagcattatttatgagcacgatgactctgagacacaagaggacagttttgtgattaaactgacagatggcaagcactccgtggagaagatggtcctcattgtggtcatccctgttgatgacgagacacccagaatgaccatcaataatgggctagaaatagaaattggggaaaccaaagttatcaacaacaaagtcctaatggcaaccgatctagactctgatgacaaatcactggtttatattatccgttatggaccagggcatggcttgttacagagacaaaaacctctaggtgcctttgaaaatatcactctaggcatgaattttacccaggacgaagtggacaggaacttgattcaatatgtccactttgggcaagaaggtattcgagacctgattaaattcgatgtgacagatggaacaaatgctcttatagatcgctacttttacgtgactattggaagtgttgacattgtcttccctgatgtggtaagtaagggcgtgtccttgaaagaaggtggcaaagtcactctgacaacggatctgctgagcacaagtgacttgaacagccctgatgagaacttagttttcaccattaccagggctcctatgagaggtcacttggagtgcacggatcgaaggggactgtccatcacttctttcactcagctccagctggctggtaacaaaatctactacatacacacggctgaggatgaggtcaaaatggacagcttcgagtttcaagtcaccgatgggcggaaccctgtcttccgaactttccggatctcaatcagtgacgtagacaacaaaaagccagtggtcaccatccacaacctggtggtcagtgaaagtgaaagtaagctgatcaccccctttgaactcactgtggaggacagagatacccctgacaggctcctaaaattcattgtcacccaggtccctgttcacggtcacctcctcttcaacaataccagatctgtcatggttttcaccaagcaagacttgaatgaaaacttaatcagctacaaacacgatggcacagaatccacggaagacagcttctccttcaccgtgactgacggcacccactcggacttctatgtttttcctgatacagtgtttgaaaccaggagacctcaagtgatgaaaatccaggtgttacctgttgacaacagtgtcccccaaattgtggtgaacaaaggagcttctacccttcgtaccctggccactggccatttagggttcatgatcacaagcaaaatactcaaagtggaggacagagacagcctgcatttttctctcaggttcattgtgacagaagccccccaacatggctaccttctcaacctgggccaaggaaaccacagtgtcacacagttcacccaagctgacattgatgacatgaaaatatgctatgtcttgagagagagagcaaatgccacaagtgatatgttccatttcatagtggaagatgacggtggaaacaggttaaccaaccagcattttcgactgaattgggcgtggatctcctttgaaaaagagtattacttgatcaacgaagactccaaatttctagatattgttcttacacgcagaggatacttgggagaaacttcatttataagtatcggcaccagggatgggactgcggaaaaagacagagacttcaagggtaaagctcagaaacaggtacagttcaaccccggccagaccagggcctcgtggagagtgcgcatcctgagcgacggggaacacgagcactcggagaccttccaagtggttctctcggagcctgtgctggcaatcctggagttccccacagtgactacagtggagatcatcgacccaggagacgaatcaaccgtgttcattccccagtctgagtactctgttgaagaagatgtgggtgagctgttcattcccatcaggagaagtggagacatcagccgggagctgatggtgatctgctacacacagcaagggacagccaccagcactgtgcggacgtccgtgctctcttactctgactacatctccaggcccgaggaccacagcagcgtgatccgctttgacaaagacgaacgagagaaaatgtgtcgtattttggtaattgatgactctttgtacgaagaggaggagactttccaggtccttttgagcatgcccatgggcgggaggatcggtgacaagtttccaggagccaatgtgaccatcctcacagacagggatgatgagcctgccttctactttggggacacccagtactccgtggatgagagtgccggctacgtggagctgcaggtgtggaggacggggaccgacctctctaagccttccagtgtcacagtgaggtcccggaaaacagaatccctctctgcagatgctggaacagactatgtgggaatcagtcgcaatttagattttgcgcctggcgtcaacatgcagactgttcgagtggtcattctggatgaccttggacgaccaatactggagggaattgagaagtttgaactggtacttcgaatgcctatgaacgctgcccttggggagcccagcaaggccaccgtgtccataaatgactctgcctcagacttgcctaaaatgcaattcaaagagagagtgtacacttgcaacgagaatgacgggcgtgtagtggccatgatctacaggagcggtgacatccagcacaggtcttctgtgagatgttacacgaggcaggggtctgcgcaggtgatgatggacttcgaggaacgcccaaataccgatgtttccactgtcacattcctccctggtgagatggagaagccgtgtgtcctcgagctgatggatgatgctgtctatgaggatgtagaggagctgcgcctggtacttggcacgcctcagggcagctctgcctttggagctgcagtgggcgagcagaacgaaaccctgataaagatccaggatgaggctgacaaagctgttatcaaatttggagaaaccaaatttagtgtcactgagcccagcagaccaggagagtcggtggttgtcaaaatcccggtcatccgtcaaggagacacttcaaaggtctccatcgtgagagtccacaccaaggatggctcggctacctccggagaggattatcaccctgtgtcagaagaaatcgagtttaaggagggagaaacccaacacactgttgaaattgaagtaatcttcgacggggtgagagagatgagggaggccttcactgttcacctaaaaccagatgaaaatatggtggcagagacacaggcaaccaaggccattgtatatatagaagaaatccacagcatggcagatgtcacctttccttctgtccctcacattgtgtccttgctgatatacgatgatccctccaaaggcagagaggacactggacctgtgtctggctacccggttgtctgcattacggcctgcaaccccaaatatccagactatgagaaaacaggctctatttgtgccagtgagaacatcaacgacactttgacccgatacagatggctgatcagcgctcccgctggccctgacggtgtgaccagccccatgagagaggtcgacttcgacaccttcttcacatcatccaaaatgattacattagactccatatactttcagcctggctcccgggtccaatgtgcggcccgagcagtgaacaccaatgggaatgaaggcctggaactaatgagccccatcgttaccatcggcagagaggaaggtctctgtcagccccgtgtgcctggggtagtgggggcagagccattctccgctaagttgcgctacactggcccagaggacccagactttgccaacctcatcaaactcactgtcactatgccgcacatagacggcatgctccctgccatctccacaagagagctgtccaactttgagctgaccctcagccctgacggcacgagagttgggaatcacaaatgctccaacctgctggactacaatgaagtaaagacccaccatggcttcctgaccaacgccacaaagaacccagaggtcattggagagacctatccttaccagtacagtgtgccggtcaggggttccagcaccttacgcttctaccgaaacctgaacctggaagcatgtctgtgggagtttgtcagctactatgacatgacggagctcctggctgactgtggaggaaccatcgggaccgatggccaggtcctcaacctcgtgcagtcctacgtgacccttcgagttcctctgtacgtttcctacgtgttccactcccccgtgggcgtgggcggctggcagcatttcgacttgaagtcagagctccgactcacattcgtgtacgacactgccatcttgtggaaccatgggatcggcagccccccggaagctgagctgcaaggctctctttacccaaccagcatgcgcattggtgaggagggacgcctggctgtgaacttcaaaacagaggctcagttccatggcttgtttgtgctgtcccatcctgcttcctttaccagctcactgatcgtgtcagctgaccatccgggcctcacattttccctccgccttatacggagtgaaccaacctacaatcagccagtccagcagtggagtttcgtgtcagactttgcggtccgtgactactcgggcacctacacagtaaagttggtaccctgcaccactccatccaaccaggagtaccgtctgccagtcacctgcaaccccagagagcctgtcacctttgaccttgacattcgattccaacaggtcagcgatcccgtggcgactgagttcagcctgaacacccacatgtatctgctgtctaagaagaatctctggttgtctgatgggtccatgggatttgggcaggaaagcgacgtggcttttgcagaaggggatgtgatttatggccgtgtcatggtcgatcctgtccagaacctcggtgactccttttactgcagcattgagaaggtgttcttatgcacgggggatgacggctacgtgcccaagtacagcccagcgaatgcggaatatggctgcctggctgattctccttcactcttacatagattcaaaatcgtggataaggctcagccagagacacaagccaccagctttggagatgtcctgtttaacgccaaactggcagtggatgaccctgaagctgttctcttagtgaatcagcctggatccgatggttttaaagtagactcaacaccactctttcaggttgccttgggccgagagtggtacatacacacaatctatacggtaaagtctaaggacaacacccatcgaggcattggcaagaggagcctggagtaccagtatcactcagtggtgcatcccggaccaccgcaggcaaccaccaagagctggaagaagagagcagtcaggagcacgccctccctcgcaggggagatcggtgctgagaacaaccggggaacaaacatccaacatatctccctgaaccgccgtggcaagaggcaggtcccccacggaagaattcctcctgacggcatcctgccctgggagctcaatagtcccagctctgaagtgagccttgtcactgtcctgggaggcctcacggtgggcttgctcacagtctgcctggctgtggctgcggccgtcatgtgcaggaacaggagcactaagggcaaggatactccaaagggctctggaagcactgagcccatgatgtccccgcagagccactacaacgacagctcggaggtgtgatggccttctcttccgtgtgcctcagaagatggggcaggacccccgactgcttgggagcagcagcagagaactgagagctttccgtgacaaaggtgctaagagcccctgactgtattaaaagattttgatttgatttgaactctattgcgccatgcatgcatcaaaggacaaattcaggccacatctttcctgctgcccagaaggcatccaggatgcttagagccttggtgggcgggcaggggaggtgcttcttgtattaggcagcgggtaagatgaaccagctccgaggtgctcaaaggtgctcaaggactctctgggaagtctgagaggagatagctatcactctgttttgttagtgtgaaatttgaaggtgctgttatcatttgtttattctttgtataactgaactgtttgaattggtaggcccgaagcgtgacaaacacacggaaatgacaagttgtctaatccgtgaagacaacatgaagtcatgaccagggctagttcaacccacgaatcacctcttactgatgggaaaacatagaaggaatgactagaaaaaaaggaaaatttgtttggatctgaattgcttctcattcccctcagacctcctttgtctcacttgcttatttaacattcacttaaaccaaagaatatattaattctggaaacggatttttaagagactaacgtcttcgggatatatttgcagccaggctctcgttaatcggcctcactgataacccagccttggtgtgaagcaagagagttgtagacgtgccggcaaagagacaccatagagttagattcgccacacgacaaggttctcaagaactgagcctagatgtttacagtattgaacccgtgcatagtgagaaacagctttaccaatggtgaagggtgagagtgatatttattaacatgctttggaccaccagaatgcctcttgggcgcgttttctagaacagtgatggcaaatgagattagtcttagaggaacagccgcacgacaccatccggagcttatatcagccacaggaaattgtattaggctaaaatctgctctaaataatgggaatctctctagacatgtcactccagaaattgacttggaggtggccatggctgtcaatcattctcttcagtgatccaggaagagaacatctctgtctggcctcccccagttcagcgagccggtgctatgaggttgccctctgggaccttatctgtgttctgtcactttgatcgttcactgtgtaaaaacctcttcagaagagtatgttagaaattctgtttagaacaggaacacttcagcagagtaatggccatttcctaaaacccagtgaatacatttataccaaaatgaatgccttcacatagccctcaaaggctgcatgaagcccctcacgcttcagccacaccctggccaagctgaaccatcctggtagaatggagatactcggaagcaaacttcatctcaggtcattcctgtatgtcagtgggtatcaacctgtgagtgccagcctgtctatcagtgggtgcctgtgagtgccagcctgtctatcagtggggagtgggtgcctgtgagtgccagcctgtctatcagtgggtagtgggtgcctatgagtgccagcctgtctatcagtgggtagtggatgcctgtgagtgccagcctgtctatcagtgggtagtgggtgcctgtgagtgccagcctgtctatcagtgagtagtgggtgcctgtgagtgccagcctgtctatcagtgggtgcctgtgagtgccagcctgtctatcagtaggtgcctgtgaataccaaccatatcttgactgagaaagggaagctgcactggtcctgaaggagaaatgcctgttgcctgcttccctctccatccagtgtctttcaagagatgagacacactgtagcacccttctgttggggagcttagcgagtcctatctatagcacaagtgtcccccaggggactgactcacaggggcagaaagcgttgtcagcccaggggtccacttatcagatggagtggttcattatcatcctttctttgttttacctccagcagacccttagctccatgtttggctacctcagaatttgggaatgaccatgttgccaacagtataggaacttccactgcttagctttcagttcatcttctgaagatagtcagagcaattgttctcaactggcttgctgtttctagtggttgagcacttccaagcctgactgccctgtggccttcagctcaggaagtgaatatagcaacgaatggcacattatcatatattgtgaccaggatgcgtctatgccaaatctcactcggctgtgcattgttctattgaagctattgtctataagttagatgttatattaagtacaagataagcctagcctcctgcaataggaaatgtcagtattctttctctctctcccatctcttcttcctcctcttactggtatttttttttcataattttaaaagtatctatttactaaatatgtggcttaaaatacagtaatcgttttaaaaatcttttcaataagaaaaaaaaatgttttttaaataaagtaagtctttgttttcaaaaaaaaaaaaaaaaaaaaa

SEQ ID NO: 346 - DNA, 2159 bp, Mus musculus
gagcagtcgcgcattcccacctcgcctcgggtgtagggattgcataggaaacaaaaccacacagtcaagactgtgtggttttgtttggagggttagaggctcaccgattcatgtcggagatggttggaaaaaccaactctacgtaggacgtcgtttcagaagcaaacttgggcttggtcccaccctttttgggcactcctgagaaatcagagtgcctgaaaagatgactactcaagcaccgatgtttacgcagccgttacaaagcgttgtggtactggagggtagtaccgcaacctttgaggctcacgttagtggttccccagttcctgaggtgagctggtttcgggatggccaggtgatttcaacttccactctgcccggcgtgcagatctcctttagcgatggccgcgctagattgatgatccccgccgtgactaaagccaacagtggacgatactccctgagagccaccaatggatctggacaagcgactagtactgctgagcttcttgtgacagccgagacagcaccacccaacttcagtcagcggctgcagagcatgactgtgagacaaggaagccaagtgagactccaagtgagagtgactggaatccctacacctgtggtgaagttctaccgggatggagccgaaatccagagctcccttgatttccaaatttctcaagaaggagacctctacagcttactgattgccgaagcataccctgaagactccgggacctattctgtaaatgccaccaacagcgttggaagagctacttccactgcagaattggtggttcaaggtgaagaagtagtacctgctaaaaagacaaagacgatcgtgtcgactgctcagatttcagaaacaagacaaacccggattgaaaaaaagattgaagcccactttgatgccagatcaatcgcaacagttgagatggtcatagatggtgccactggacagctgccacataaaacacctcccaggatacctcctaagcccaagtccaggtctccgacaccaccttccattgctgccaaagcacagctggccagacaacagtccccatcaccaataagacactctccctccccagtcagacacgtgcgggcaccaaccccatctccagtcaggtccgtgtctccagcggggaggatctccacttccccgatcagatccgtgaagtcgccactgctcattcgcaagactcagaccaccaccatggccacaggccccgaggtgcctcccccttggaagcaagagggctacgtggcctcctcgactgaggctgagatgagagagacgacaatgacaagctctacccagatcagaagagaagagaggtgggaagggagatacggggtccaggagcaagtgaccatcagtggagccgcggctgctgcggccagtgcgtcggtcagctcgtcattcacggcaggagccatcaccactgggactaaggaggtgaaacaagagacagacaagagtgcagctgttgcgactgtcgttgctgctgttgatatggccagagtgagagaaccagccatcagtgctgtagagcaaactgctcagaggacaaccacgactgctgtgcatatacaacctgctcaagaacaggcgagaaaagaggcggagaagaccgcagtaaccaaggttgtagttgctgccgataaagccaaggaacaggaactaaaatcacgaaccagagaagtgatggtgacaacgcaagagcagactcacatatctcatgagcagataagaaaagaaactgaaaaagcatttgtaccaaaggtagtgatctccgcaaccaaagccaaagagcaagaaactagaatcacgggagaaattactacaaaacaagagcaaaagcgaataactcaagaaacaataagacaggaaactgaggaaattgctgcatccatggtagtggttgccaccgccaagtccacaaaactagaggcagctgtgggagttcaagaagagactgccatacaacaggatcaaatgcacctcactcatgaacagatgatgaaggaaactaggaaaacagtggtacccaaagtcatagttgccacgcccaagattaaagagcaagatttagtatcaagaagtagagaagccatcactaccaaaagagatcaagttcaaataactcagg

SEQ ID NO: 347 - DNA, 4355 bp, Mus musculus
aagaggtaatccggatccacaaatatggaaacgcggatacccgcttttttaaaaacactgatgatatcaattaaataggattggcgcttgatcgtatcccagccatgatcactggtgagttgtcctaatgcatccggaaccaatgttacttgatgtggttttgtttccaataccaagtcaataaatttttgttctgttggattcccttcaatattaaattcagtagtgatgatttttcgaatggctcttgtgtcatcatagcgaatatgtctttcatcaggacgaggatgtacggtcacgccatctgccccaaaacgttcggcatccatggcagccttgatgacatccggattattcccacctctgctatttctcagggtggcgaatttattgatgttaacactgagttttgtcatgctgcaaaggtactcagaactaaagaaattctccgcgatatctctttttctcttgtcctgcggttaatgtagagtatttttaccgcagaacaagagaaaaagaggagctatcctaagtaatgcatcaccacactggcagtagtaagacccacaatatgatacccgcaatcgatgagataaagagcaaatggctttttcgtatacaaatacccaatactaatagccggagtactgaatcctatagataataggatacccagatgaaaagcatccatatagttattcataggaaccatttgtctaaaaatagttaacccaacacaagaaacagccatgaaaataaagctgatccccataatagcaccggctccttttttggcattcggatcattcatgtcaatattggataaacgtacccaggcttttgaaaataaaaaactgtaccaaatggcaccaatcagaaaataagcgagagtgctcagaaagaaagatagccaattgacatggtctgtaaaatgatgtaacataatttggttgtttagggttttgaatggtattaaggtcggaaataaaacgcagttctgcaacacacttatgtgtaatgacttattttgcaggaggaatacttctgctcaactatttgcagccaacaatgttttaaaactatgtcttacccatcactcgaatcctgcctaattgatttggaaaaaaatggtcagttagtacgcattaaagaagaagtagatccttatttggaaatggcggctattcacttgcgtgtatacgagatggggggtccggcactactatttgagcatgtaaaaggaactgagtacagagctgcctccaatattttcggaacattagacagaagcaggtttatattccgcgaaacactggctcaagttcaaaagttgattgagctgaagggcgacccgatcaaggcgattaaacaacctttgcaaaatattcgtactggtattgcagctctcaaggcattgcctttaaaaaatccactcaataaaccggtattgtatcgagaaataaaaatcagtgatctccctttgatacatcattggccgatggatggtggtgcttttgttactttaccccaagtgtatacagaagatgtggatcagccgggtattatgaaagccaacctgggtatgtatcgtattcaattgaatgggaatgattatgaaaaagacaaagagatcgggttgcattatcagctacacagaggcattggtgttcaccaaacaaaagcgaacaaaaaaggacttccattaaaagtaagttgtttcgttggcggaccaccttcacatacagtagcagcagtcatgccattgccggaaggcatcagtgaaatgacatttgcaggggtattaggaggcagacgtttcagatacacatatgaggatggattttgtttgagtaccgatgctgattttgttattacaggtgaagtgtatccgggtggcaacaaacctgaaggtccttttggtgatcatctggggtattatagtttacaacatccttttccattgatgcgtgtacacaaagtatatgctaagaaaaatgcgatctggccttttacggtcgtaggaaggcctccacaagaagataccagttttggacaattgatccacgaaattaccggagatgcgataccacaggaaatacccggtgtgaaagaagtacacgccgtggatgctgcaggtgtacaggattacctcttgtcgacaagaggtaatccggtggcggccggcctctcctcctcctcagctccgtttttcctctcctcgctttttccctttccccccgacccccggggcccagagcggccggacttctcgctcccttctctacggcggcctccgagcccccgcgtgcgctcctttccccgccatgaatgaggaatacgacgtgatcgtgctgggcaccggcctgacggaatgtatcctgtcggggataatgtcagtgaatgggaagaaggttcttcatatggatcagaacccatactatggaggagaaagtgcgtctataacaccgctggaagatttatacaaaaggtttaaattaccaggacaaccgccagcatcaatgggaagaggaagagactggaatgttgacttaattcccaagttccttatggccaatggtcagttggtgaagatgctgcttttcacagaggtcactcgttacatggacttcaaagtgattgagggaagctttgtctacaagggagggaaaatctacaaggttccttccactgaagcagaagccctggcatctagcttaatgggactgtttgagaaacgccgtttcaggaagttcctggtttatgttgccaactttgatgaaaaagatcctagaactttcgagggtgttgatcctaagaagacctccatgagagatgtgtataagaagtttgatttgggccaagatgttatagactttactggccattctcttgcactgtacagaacagatgactacttagatcagccgtgttgtgaaaccattaatagaattaaactttacagcgagtctttggcaagatacggtaaaagcccgtacctgtatccgctttatggtcttggagaattgccgcaaggatttgcaaggttaagtgccatatatggaggtacctacatgttgaataaaccaattgaagaaatcattgtgcaaaatggaaaagtggttggtgtaaaatccgaaggagagattgctcgctgtaaacagctcatctgtgatcccagctatgtaaaagatcgggttgaaaaagtgggccaggtaatcagagtgatctgtatccttagccaccctatcaagaacaccaacgatgccaactcctgccagatcatcattccacagaaccaagtcaaccgcaagtcagatatctatgtttgcatgatctcctttgcacataatgtggcagcacagggcaagtatattgccattgtaagtacaaccgtggagaccaaggaaccagagaaagaaatcagaccggctttggagctcttggaaccaattgaacagaaatttggcagcatcagtgacctctttgtacctaaagatttgggaacagatagtcagatcttcatttcccgtgcctatgatgctaccacgcactttgagacaacctgtgatgacattaaagatatctacaagaggatgacaggatctgagtttgactttgaggaaatgaagcgcaagaagaatgacatttatggagaagactaacagcagtacatattatgtaataattaggacaaacttaaaatttggcaataatgtatattgtatgaaatcaatactgtaagccctgcttttatgatcaaaatggagattgaagagtgctataccagtgaatgctccttcactttctaatatcatgtattaacttgttttcatggaatggctagtcagaattggttggttctgttcagtttaaccagactgcattttgctctaaaacaaatattgatatcgatagagaacttgtatcatttaatcagtgtagcctttgcgattgtgtgatccaagagctggatccatacaatttgtgccaccctgaaattgggactctaaattgagtatcctttggtttctgaagacgttcaacgctttctctattttgttatgtcaagtatcacagcagggccaatagaagagagccacatgttttgtttatgagggtagccaaacttcagacctacaacagttgctgagaaaaggaaaggagccttaaggtaaagcaggtaaaatacaggagccccttttatcccagacacggctcctcccccggaccaagctgcaatgcagtattaatctgacagagcctcaatgtcaacgatgcctgttccaaaatggctccagatgatttctgtactgcaaaataaagccaaactctggaaaccaaaaaaaaaaaaaaaa

SEQ ID NO: 348 - DNA, 1253 bp, Mus musculus
gacaagaggtaatccaagattgcagtacattgagctccatagagacagcgcttgtggaagaaaaaagtagatcctaagaagccaaaaggcaaaatgtcctcatgtgtgttctttatgcaaacctgccaggaggagcacaagaagcacccggatgcttctgtcaactcagagtcctccaagaagtgctcagagaggtggaagaccatgtttgctaaagaaaaggggaaatttgaagatatggcaaaggctgacaaggctcgttatgaaagagaaatgaaaaattacatttcacttccatcccccaaaggggtaaccaaaaaagaagttcaaggacccagtgcttccaagaggccttcgccttgttctgttctgagtaccgccccaaaatcaaaggccagcatcctgggttatccattggtgatgttgcaaagacactaggagagatgtggaacaacactgcagtggataacaagcagccccataagaagaaagctgccgagcagaaggaggagtacgagaaggatattgctgcctacagagctaaaggaaaacctgatgcagcgaaaaagggggtggtcaaggctgaaaagagcaagaaaaaaggaaggtgaaaaggatgagcaagacaaagatgatgggatgaataagttggttttaggacagtttttttcccccctgtctataaagcatttaatcccctgtacacaactcactccttttaaagaaaaaaaaaaaaactgtaagtctgtgtaagatttgtttttaaactgtacagtgtcttttatttttgtagttaacacactactgaatgtgtctttagatagccctgtcttggtgtggtattttcaatagccactaaccttgcctggtacggtctaggggttgtaaattggtatggaaatttaaagcacggcacaaattatgtatggggacagttttttttctttttcttttttctttttttttggttttatctttttttgtttgttttgtcttcagttgtctctgatgcagcttatatgaagataattattctgttaacggaataccactctgattgcaaaaaaagcagctgttttgttgacatgttgactgctaagtaaatacaacttttttattaaaaaaagatacatcataagtgggtaacatgattaaacttgggctttggagcccacctcccatttgtgagcaatagtcaatacttaatacctgacattaatatatctagaacctgatgtaaaaaaaaaaaaaaa

SEQ ID NO: 349 - DNA, 1219 bp, Mus musculus
cccacgcgtccggcgtgagcggaggctttggctgcaggggaaggaggactatgaagcttccgaatatcctgctcaccggtacaccaggggttggaaaaaccacactaggcaaagaacttgcatcaagatcaggcctgaagtacgttaacgtgggagatctagctcgagaagtctgatcagcggatatcatggagtctggcaagatggcgtctcccaagagcatgccgaaagatgcacagatgatggcacaaatcctgaaggatatggggattacagaatatgagccaagagttataaatcagatgctggagtttgccttccgatatgtgacaacaattctagatgatgctaaaatttattccagccatgctaagaaagctactgttgatgcagatgacgtacgactggcaatccagtgccgtgctgaccagtctttcacttctccacccccgagagatttcttattagatattgcacgacaaagaaatcaaacccctttgccactgatcaagccatattcaggtcctagattgccacctgataggtattgcttaactgccccaaactataggcttaagtctttacagaaaaaggcacctgctcctgcaggaagaataacagttccaaggttaagtgttggttcagtttctagtagaccaagtactcccaccctaggtacaccgactccacaaaccatgtctgtttcaactaaagtaggcaccccaatgtccctcacaggacagaggtttacagtacagatgcctgcttctcagtcccctgctgtaaaagcttctatacctgcaacatcaacagttcagaatgttcttattaatccatcgttaattgggtccaaaaacattcttattactactaatatggtatcacagaatacagccgagtcagcaaatgcactgaaacggaaacgtgaagacgatgatgatgacgatgatgacgatgatgatgatgactatgataatatgtagtctagccacgatgcatgtaacctgtgttcttggacttggatccattgtactacaagttaaaaagcatgttagatgttttaaagctgtactttagaaagtggtgtttcatacgtatgctttgctttttgattaaaatgttcagttttactagaactagtgatggtttttcatcaacctttatgcacaaaaaataaaattgtcatttatcagtttaaaaaaaaaaaaaaaaaaaaaaa

SEQ ID NO: 350 - DNA, 3249 bp, Mus musculus
atggccacccaggtgatggggcagtcttctggaggaggcagtctcttcaacaacagtgccaacatgggcatggccttaaccaacgacatgtacgacctgcacgagctctcgaaagctgaactggcagcccctcagctcatcatgttagccaacgtggccctgacgggggaggcaagcggcagctgctgcgattacctggtcggtgaagagaggcagatggccgaattgatgcccgtgggagacaaccacttctcagaaagtgaaggagaaggcctggaagagtcggctgacctcaaagggctggaaaacatggaactgggaagtttggagctaagtgctgtagaaccccagcccgtatttgaagcctcagctgccccagaaatatacagcgccaataaagatcccgctccagaaacacccgtggcggaagacaaatgcaggagttctaaggccaagcccttccggtgtaagccttgccagtacgaagccgaatctgaagagcagtttgtgcatcacatccggattcacagcgctaagaagttctttgtggaggaaagtgcagagaaacaggccaaagcctgggagtcggggtcgtctccggccgaagagggcgagttctccaaaggccccatccgctgtgaccgctgtggatacaataccaaccggtatgaccactacatggcacacctgaagcaccacctgcgagctggcgagaacgagcgcatctacaagtgcatcatctgcacgtacacgacggtcagcgagtaccactggaggaaacacctgagaaaccatttccccaggaaagtctacacctgcagcaagtgcaactacttctcagacagaaaaaataactacgttcagcacgtgcgaactcacacaggagaacgcccgtataaatgtgaactttgtccttactcaagctctcagaagactcatctaacgcgacacatgcggactcattcaggtgagaagccatttaaatgtgatcagtgcaattatgtggcctctaatcagcatgaagtgacccgacatgcaagacaggttcacaacgggcctaaacctcttaattgcccgcactgtgactacaaaacagcagatagaagcaacttcaaaaagcacgtggagctgcatgttaacccacggcagttcaactgccccgtgtgtgactacgcggcttctaagaagtgtaatctacaataccatttcaaatctaagcatcccacctgtcccagcaaaagaatggatgtctccaaagtgaagctaaagaaaaccaaaaagagagaggctgacctgcttaataacgccgtcagcaacgagaagatggagaatgagcaaacaaaaacaaagggggatgtgtctgggaagaagaacgagaaacctgtaaaagctgtgggaaaagatgcttcaaaagagaagaagcctggtagcagtgtctcagtggtccaggtaagtaccaggactcggaagtcagcggtggcggcggagactaaagcagcagaggtgaaacacacagacggacaaacaggaaacaatccagaaaagccctgtaaagccaagaaaaacaaaagaaagaaggatgctgaggcccatccctccgaagagcctgtgaacgagggaccagtgacaaaaaagaaaaagaagtctgagtgcaaatcaaaaatcagtaccaacgtgccaaagggcggcggccgagcggaggagaggccgggggtcaagaagcaaagcgcttcccttaagaaaggcacaaataagacgccgcccaagacaaagacaagtaaaaaaggtggcaaacttgctccaaaggggatggggcagacagaaccttcttctggggcattggctcaagtgggggtgtctccagaccctgccctcattcaggcagaggtcaccgggtcaggatcttctcagacagagcttccttcacccatggatattgctaagtcagagcccgcccagatggaggtttccctaacagggccacctccggtggagcctgctcaaatggagccatcgcctgcgaaacctccccaggtagaagcacccacttacccccagcctccccaaagggggcctgcccctcccacggggcctgcccctcccacggggcctgcccctcccacggagcctgcccctcccacggggcttgccgagatggaaccttctcccacggagccttcccagaaggaaccacctcccagtatggagcctccctgccccgaggagctgcctcaggccgagccacctcctatggaggattgtcagaaggagctgccttctcccgtggagcccgctcagattgaggttgctcagacggcccctacgcaggttcaggaggagccccctcctgtctcggagccacctcgggtgaagccaaccaaaagatcatctctccggaaagacagagcagagaaggagctgagcctgctgagtgagatggcgcggcaggagcaggtcctcatgggggttggcttggtgcctgttagagacagcaagcttctgaagggaaacaagagcgcccaggaccccccagccccaccgtcaccatcgccaaagggaaactcgagggaagagacacccaaggaccaagaaatggtctctgatggggaaggaactatagtattccctctcaagaaaggaggaccagaggaagctggagagagtccagctgagttggctgctctcaaggagtctgcccgtgtttcatcctctgaacaaaactcagccatgccagagggtggagcatcacacagcaagtgtcagactggctcctctgggctttgtgacgtggacactgagcagaagacagatactgtccccatgaaagactccgcagcagagccagtgtcccctcctaccccaacagtggaccgtgacgcagggtcaccagctgtagtggcctcccctcctatcacgttggctgaaaacgagtctcaggaaattgatgaagatgaaggcatccatagccatgatggaagtgacctgagtgacaacatgtctgaggggagtgacgactcaggactgcacggggctcggccgacaccaccagaagctacgtcaaaaaatgggaaggcagggttggctggtaaagtgactgagggagagtttgtgtgtattttctgtgatcgttcttttagaaaggaaaaagattatagcaaacacctcaatcgccacttggtgaatgtgtacttcctagaagaagcagctgaggagcaggaggagcaggaggagcgggaggagcaggagtag

SEQ ID NO: 351 - DNA, 3225 bp, Mus musculus
gggccacaccccgcgcacggcccaggcgcttcccgccggttgaatcatccccgcagcagcgctcccgcagtccgctgcagcccccgggcccggccgcgccccagccgagtgccgtgccccgcctctccgcgacccctttctccgtgcagtgcgccaaccggatcgctaccatggcgggcatcgcgataaagctggccaaggaccgcgaagcggccgaggggctggggtcgcatgagagagccatcaagtacctcaaccaggactacgagacgctgcggaacgagtgcctggaggccggggcgctcttccaggatccttccttccccgccctgccgtcatccttgggctataaggagttggggccctactccagcaaaactcggggcatcgaatggaagcggcccacggagatctgcgctgacccccagttcattattggaggagccacccgcacagacatctgccaaggagccctgggggactgctggctgctggctgccatcgcctccctcaccttgaatgaggaaatcctggctcgggttgtgcctccagatcagagcttccaggaaaactatgcaggcatcttccacttccagttctggcaatatggcgagtgggtggaggtggtggtggacgacaggctgcccactaaggacggggagctgctctttgtgcattcagctgaagggagtgagttctggagtgcccttctggagaaagcctatgccaagatcaatgggtgctatgaagcactctcagggggtgccaccacggaaggctttgaagacttcacaggaggcattggtgagtggtatgagctgaggaagcctcctcccaacttgttcaagatcatccagaaggctttggagaaaggttctctgcttggctgctctatcgatatcaccagcgctgcagattctgaggccgttacgtaccagaagttggtgaaaggacatgcgtactctgtcaccggagccgaggaggttgaaagttcaggaagcctgcagaaattgatccgcatcaggaatccctggggacaagtagagtggaccgggaagtggaatgacaattgccccagctggaacacggttgacccagaagtaagggcaaatctaaccgaacggcaggaggacggagaattctggatgtccttcagtgacttcctgagacactactctcgcctggagatctgcaacctgaccccggacaccctcacctgtgactcctataagaagtggaaactcaccaagatggatgggaactggaggcgaggctccaccgcagggggctgcaggaattacccaaataccttctggatgaaccctcagtacctaattaagctggaggaagaagacgaagatgaggaggatggggagagaggctgtaccttcctggtgggtctcatccagaagcaccggcgacggcagaggaagatgggcgaggacatgcacaccattggcttcggcatctatgaggttccagaggagctaacagggcagaccaacatccacctcggcaaaaactttttcctcacaacccgagccagggagcggtcagataccttcattaacctccgcgaggtcctcaaccgcttcaagctgcccccgggagagtatgtcctcgttccctccaccttcgaaccccacaaggatggcgatttctgcatccgagtcttctcggagaagaaggctgactaccaagctgttgatgacgagatcgaggccaacattgaagagattgacgccaatgaggaggacattgacgatggattccgaaggctctttgttcagctggctggagaggatgcagagatctctgcctttgagctgcagaccatcttaagaagagttctagccaaacgccaagacatcaagtcagacggcttcagcatcgagacctgtaagatcatggtggacatgctggatgaagatgggagtggcaagcttggcctgaaggagttctacatcctctggacgaagattcagaaataccaaaaaatctaccgggaaatcgatgtggacaggtctggaaccatgaattcctacgagatgcggaaagcactggaagaagcaggtttcaagctgccctgtcaacttcatcaagtcatcgttgcccggtttgcagacgacgagctaatcatcgactttgacaattttgtgcggtgtttggtccgtctggaaacgctattcaagatattcaagcagctagaccctgagaacactgggacgatacagctcaaccttgcttcgtggctgagtttttcagtactctgaagttacatgcctggagaggtctagtgggagaaaacaaccaatgactacacttagacactttgtatctggaccttgaacttacgggaacattgacttcatcggatgattataactgaagaatataaccgtctgggatagatgaacttttcacatatcagagtaacatatttgcatattattaaaccaaatgcaaatgaattgcataacccttggtaaggtcagaggaagcgttacacctgtaaatagtatatcctttttacttctacacattgtcctggccatagcaatattaaatcaggaaggaatgcagagagctttaaataactgggcaaatagtaaaccaatctcagaggctacaaggccttgatgggaatatttgaagaaattttaacttttaaatgcagtggtggcacctgccacagcagcccagagactgccgcttgccctgagcgaactgagaaatacaatgacgaagtagtctgatggaggcatctaaagaacccagtctgatggaggcatctaaagaatccaggagccaggagtgtctgacacaaggccaacctgggctgcctagcaagacccgatctcagaaaataaatgccaatttaaaaaaagggcatgcttgcttccatcatttggttctaacagaagatggtttttatatacctttagcattcttaaactcaagtccttgaccatatttggccttagacacttaggtctgacaagtagtaagtaatgagatcactctgaccaactgagccaggtgtgccgtctgcaagaagatcgtgataaaccccagggactgtgcctacagctggggaggacagggctcagaagatcttcttaaaacaaccaagctggcttcttcatcctgggaaaatgctagcaaccatacagacatattgccttatctacttccaaacgtactgttaataaagagttacaacac

SEQ ID NO: 352 - DNA, 5817 bp, Mus musculus
gcggcggtggccgagtcgccgcagctgtagcagccgccgcgaagatggcggaggggttggagcgtgtgcggatctccgcatcggaactgcgagggatcctggccactctggctccgcaggccgggagcagagaaaacatgaaggaactaaaggaacccagacagcgcaaagataataggcgtccagatttggaaatctataagcctggactttctcgactaaggaacagacctaaaactaaggaggcttctgggaatgaggaatttaaggatgagatagtaaatgacagagattcttctgctgttgggaatgatacacagcttattcaagtttgcaaggaattggacagccaacagcaaaatggccctatagatgcagaaaatagtcaggcacaggaaacttttccaaagactgttggactagaggaccgaagtctaaagatcatcaaaagaagcaagaaaccagacctgcagatctaccagcctggaaggcggttgcagaccattaccaaagagtcagcaggcagggcagatgaagaagagatcctcaaccaagtggagcagttgaggatagaggaggatgagtgtaagggagaagctataaaagaagaagttaataacaaaccggataaaaccgagatagaaaagcaccaaagtaatgaccgtgtaagaactgccaagggagaaaagggaaaaaagattgaaaagggggaggggtcaaagaaggtggctgatgactctgtcccaggaaagcctggctctgtaaagagatactcgagatcagacaagagaaggaatcgctaccgcacttgcagtaccagctcagctggtagcaacaacagtgctgagggagctggcctgaccgataatggatgtcgccggcggcgccaggatcgggccaaggagaggccacgactgaagaagcaggtatctttgtcctcaactgattccttagatgaggacagagttgatgagcctgatgtcctagggtccaggaggagctcagaaaggaagaagcatttagaaagaaattggtctggctgtggtgagggtgaacagaaaagcaatggtaaagaaaaccgaagtgcccttcgtgtcacttttgatgcagaaaccatgagtaaagactcccctgtggtgaggtcagtcaaagataatgtggatagaatgaagtctgacaaaggcccaagcagtgggggtaagggctctgagaagcaggagctcagacacccgagacaagaacttcgagatcgtggtcgtggtatcctgattctgcctgcccacactgccctatctgtcagttcatcaggttctccggagtctacacctttgggacctcgacttttatttggatctggtagtaagggatctcggagttggggccgtggaggcactacccgccgactatgggacccaaacaatcctgaccagaagcctgccctaaaaagccagacacctcagctacatttcttggacactgatgatgaaattagccctacatcttggggtgattcacgtcaggcccaagcatcttactataaatttcaaaactctgataacccctattattaccctcggacaccaggccctgcctctcagtatccctatgcaggctatagccctctgcagtacccagtaggccctacaaatggtatgtatccaggggcttactacccgggctatcctgccccctcaggacaatatgtgtgtagccctctccctgctagcaccatgagtcctgaggaaatagaacagcacgtgcggaacatgcagcaacaggagctccatcggcttctccgagtggctgacaaccaggaactgcagctcagcaacctgctttccagggaccgcatcagcactgagggcatggagaagatggctcagctcagaactgaactactgcagctgtacgagcgctgtattctattagatattgaattctccgacagtcagaatgtagatcagatcctgtggaagaacgctttctatcaggtgattgagaagttcaggcagcttctcaaggatccaaacagtgagaacccagagcagattcggaacagactcttggagctcttagatgagggcagtgacttctttgatagtttgcttcagaaactacaggttacttacaagttcaaactggaggactacatggatgggcttgccattcgaagcaagcctttacgaaaaacagtgaaatatgccttgatcagtgctcaacgaagtatgatttgccaaggagatatctctaggtatcgggagcaagccaacgatacagcaaactatgggaaggctcgcagttggtatctgaaggctcagcacattgctcccaagaatgggcgcccctataaccagttggctctactggcagtgtatacgaggaggaagcttgatgctgtatattactatatgcgcagtttagcagccagcaaccctatcctgactgccaaggagagtctcatgagtttatttgaagagactaaacgaaaggctgaacagatggaaaagaagcagcatgaggaatttgatatgagccctgataagtggcgaaaaggaaagaagtctactttccggcatgttggggatgacactactcgcctggagatttggattcatccatcacattctcggtctgcccagggcactgagtctgggaaggattctgagcaggagaatggtctgggcagcctgagtcccagtgatctgaacaaaaggttcatcctcagttttctccatgcccatgggaagctgtttacccggattgggatggagacattccctgcagtggctgagaaggtccttaaggagttccaagtattgctgcagcatagcccatctcctattggaagtacccgtatgctgcagcttatgaccatcaacatgtttgccgtgcataactcccagttgaaagactgcttctcagaggagtgtcgttctgtgatccaggaacaagctgcatccttgggcttggctatgttttctctactggtccagcgctgcacatgcctacttaaggactctgctaaagctcagctgtcctctcctgaggaccaagaggaccaagatgacatcaaggtatcttccttcgtcccggacctgaaggagctgctccccagtgtgaaagtctggtctgattggatgcttggctacccagacacctggaatcctccacccacatctttggatctgcccttgcaggttgctgtggatgtctggtcaacactagctgatttctgtaacatactgactgcagtcaatcagtctgaggtgccactgtacaaggacccagatgatgacctcaccctgcttatcctggaagaggatcggcttctctctggctttgtccccttgctggctgcccctcaggacccctgctacgtggagaaaacctcggataaggttattgcagctgactgcaaaagggtcacagtgctgaagtattttctggaagccctttgtggacaagaagagcctctgctggcattcaagggtggaaaatatgtgtcagtggcacccgtcccagacaccatgggaaaggaaatgggaagccaagagggaaaacaactggaagatgaggaagaagatgtggtgattgaagactttgaggaagattcagaggctgaaggcagtgggggtgaggatgacatcagggaacttcgggccaagaagctggctctagcaaggaagatagctgagcagcagcgtcgccaggaaaagatccaggctgttttggaagaccagagtcagatgaggcagatggagctggagatcagacccttgttcctcgtaccagataccaacggcttcattgaccacctggccagtctggctcggctgctggagagcaggaagtacatcctggtggtgcccctcatcgtgatcaatgagctggacggcctcgccaaagggcaggagacagaccaccgggctgggggctatgcccgtgtggtgcaagaaaaggcccgaaaatccattgagttcctcgaacggagatttgagagtcgggactcctgcctgcgggccttgaccagccgtggcaatgaacttgaatctatcgccttccgaagtgaggacattactggacagctgggtaacaacgatgacctgatcctctcttgctgcctgcactactgcaaagacaaggctaaggattacatgcccaccagcaaagaggagccaatccgcctgttacgggaggtggtgttgctgaccgatgatcggaaccttcgtgtaaaggcgctgacaaggaatgtgcctgtgagggacatcccagccttccttacgtgggcccaggtgggctgaggggaccacactggggcccacccccatggagccattcctgagaggccgccaggcgcccagtgtaacacggaagatgtccacgtgcctgagctaccaatccacccagacaataaaccatcctcttccaacctcacgccgtggccgtgctgtgggggagccgctcctcacagagccctcccaagggtcaggcggaaactgctgggaccctcctgggctgccaagatttagcagggaggtgactggctacagtgacaacaggtggacaagccgagtaggccaccaagctcccaccctttttccctctatctggtcccagggctggagggaggcctactcaccccgaggacccagccactctgtagtggtaaggggcagagattctaaagtttccattagatgcaaggaaactgatcaacccctcagtctgcacagtctctgtcctgaatgtctgagaggcttcagctgtcaggaagggtgcccaggtgtctccatctccctgaggcccagatgccctgtggacccacgctgacttctgtctgtaacagcaacagcagccctcgcccttcaacacacacgcacgcactcacacagcacatgtgcacatgtttctcttcctgtccacatcttgcactttgcccttgttttccttttgggcagtcatgggcctaagggaagggccatctggtcttgggcccgtgcgtcctgagtggccctccaccagcacatgctcccatccttggccttcctttcactgcagtaccctcttggggaaatttcctcagactcttctttgctgccttccttttctagttggcccctttcatcaccccaaaccccctaaacttcctcccctcagttccttgtgggacttctcgttctgaatcttacccctaccacctgtgacaggaaccaaataaagccttcccagctgtccttccttcccaacccgtcacacctctgagaagtctcctagctgggagagctgaaccccaaggtagaggtgccagggtgttgagcccgtttctggctttgtcattgtacttctttacccagaagaggggacatggggccctttagcctttgagggttttggttcttttaggttttttgtttttgttttttgctgcctctgtttacaacctcacttggaggctcccgaccaggaatgaattccttcagtctagcaaagaggtagaggaggattgagaaggctgtctcaggctaagcaggggatcacacaacccacctcaggaggagcagtgcttcaccaagggtgctctgcccttctcaggcccaggacagtgcccaggactcagctcagaagctctcttgattgtaaggcgcaggcaggctacttcctttgaggtcccctcctctggctgtgagggtcattggctgggggttgggggattgggaatggaagaatacctttcttctttctgtcccacttggaaccctggttttgtttccttaataaatttttagttatgaaatataaaaaaaaaaaaaaaaaaaa

SEQ ID NO: 353 - DNA, 2079 bp, Mus musculus
gcaattcctgctgatcctgactgaaggagaagctgcagctactctgtccgtttcctgtatgacttcagctactggctagtcccagcagagtgggaaaagcggttttttttccccctcagtcttcttttgggctggctagtttttcaggactcagtcttggactgtgggacaagccactgggttcttcaagggataaaccagcggagaaagaacacacctttggttaaaggagacgacaacaggtgggaatgagatctcgaaatcaaggtggagaaagttcatctaatgggcatgtctcctgccccaagccctccatcatcagcagtgatggtggtaagggaccctcagaagatgcaaaaaagaacaaggcaaatcggaagggggaggatgatgtcatggcttccggaaccgtcaaacgccacctcaagccatcaggagagagtgagaaaaagactaagaagcctctggagttatccaaggaggacctcatccagctcctgagcatcatggaaggggagctgcaggtgggaatgagatctcgaaatcaaggtggagaaagttcatctaatgggcatgtctcctgccccaagccctccatcatcagcagtgatggtggtaagggaccctcagaagatgcaaaaaagaacaaggcaaatcggaagggggaggatgatgtcatggcttccggaaccgtcaaacgccacctcaagccatcaggagagagtgagaaaaagactaagaagcctctggagttatccaaggaggacctcatccagctcctgagcatcatggaaggggagctgcaggctcgagaagatgtcatccacatgctgaagacggagaagaccaagcccgaggttctggaggcgcattatggatctgcagaaccagagaaagtgcttcgagtcctgcaccgcgatgccatccttgctcaggagaagtccataggagaagatgtctatgagaaacccatctcagagctggacagactggaggaaaagcagaaggagacataccgccgcatgctggagcagctgctgttggctgagaagtgtcacaggcgcaccgtgtacgagctggaaaacgagaagcacaagcacaccgactacatgaacaagagcgacgacttcaccaacctgctggagcaggagcgagagaggttgaaaaagctccttgagcaagaaaaggcttaccaagcccgcaaagaaaaggaaaacgccaagcggctcaacaaacttcgggatgagcttgtgaaactcaagtccttcgcactcatgctggtggatgagaggcagatgcacatcgagcagctgggcctgcagagtcagaaagtccaggacctcactcagaaactgagagaggaggaagaaaaactcaaagccatcacttacaagtccaaggaagaccgccagaaactgctcaagttggaagtggacttcgaacacaaggcctcgaggttttcccaggagcacgaagagatgaacgccaagttggctaaccaagagtctcacaacaggcagcttagactcaaactggttggcttatcgcaaaggatcgaggaactggaagagaccaataaaagtcttcagaaggccgaggaagagcttcaggagctgagagataaaattgccaaaggggaatgtggaaactccagtctcatggcggaagtggaaagtctgcgcaagcgcgtgcttgagatggagggcaaggatgaagagatcactaagaccgaggcccagtgccgggagctgaagaagaagctccaagaggaagaacaccacagcaaggaacttagactagaagtggagaagctgcagaagaggatgtctgaactggagaagctggaggaggccttcagccgcagcaagtcggaatgcacccagctccatttgaacctggagaaggagaagaacctaaccaaagacctgctgaacgagctggaggtggtcaagagtcgggttaaagaactcgagtgctcggagagcagactggagaaggttgagttaagcctcaaagacgacctcacgaagctgaagtccttcactgtgatgctggtggacgagaggaaaaacatgatgg

SEQ ID NO: 354 - DNA, 1349 bp, Mus musculus
ggtaggagcggcgcttgaggcctggaagcgttccgcggcctgccgggtcagcaccatgagctccatcggcactgggtatgacttgtcagcctctacgttctctcctgatggaagagttttccaagttgaatatgccatgaaggctgtggaaaacagtagtacagcgattgggatcagatgtaaagatggtgttgtgtttggggtagaaaaactagtcctttctaaactttatgaagaaggctccaataaacgtctttttaatgttgatcgacatgttggaatggcagttgcaggtttgctggcagatgctcgttcattagcagacatagcgagagaagaagcatccaactttaggtccaacttcggctataacattcctctaaaacatcttgcagacagagtggccatgtatgtacacgcctatacactctacagcgctgttagaccttttggctgcagtttcatgttggggtcttacagtgcgaatgatggtgcacagctctatatgatcgacccatcaggtgtttcatatggttactggggctgtgcgattggcaaacgcaggcaggctgcaaagacagagatagaaaagcttcagatgaaggaaatgacttgccgtgatgtagttaaagaagttgcaaaaataatttacatagtacacgatgaagttaaggataaagcttttgaactggagctcagctgggttggtgaattaactaaaggaagacatgaaattgttcccaaagacataagagaggaagcagagaaatatgccaaggaatctttgaaggaagaagatgaatcagatgatgacaatatgtaatattttcttccccatccgctggtttacatttctgtaacagttgcatatggctagcaccatggactatatatacccactgaccgattttcattaaattttgtcttataaacattgttgggtaattgaagctatctgtgtaatattaaaatatagattgatgtttgattaaaaattcttagaactgggcctggagagatggctcagcagttaagagctgctcttccaggggacataggttcaattcccagcacctacaatggcagctcacacctgtctgtaactccagttccaggcttctgacacctacaaactgaggtacatgcaggcaaaacaccaatgaatataaaataaaaataaatgatatctacttacacatataataaatgcaaaaatacaaatatgtatatatacagacacacatgtgtatatacatttaaattcttggtgctattctcgtgtggtagtacatgcctttaatcctagtactcagaggcaggtggacctcttgagttcaaggctagtattc

SEQ ID NO: 355 - DNA, 2992 bp, Mus musculus
agtagccatgcctctcagccgcagtctctctgtgtcctcgcttccaggattggaagactgggaggatgaattcgaccccgagaacgcagtgcttttcgaggtggcctgggaggtggccaacaaggtgggtggcatctacactgtgctgcagacgaaggcgaaggtgacaggggatgaatggggtgacaactactatctggtgggaccatacacggagcagggtgtgaggacgcaggtagagctcctggagcccccaactccggaactgaagaggactttggattccatgaacagcaagggttgtaaggtgtattttgggcgttggctgatcgaggggggacccctagtggtgctcctggatgtaggagcctcagcctgggccctggagcgctggaagggtgagctttgggacacctgcaacatcggggtaccctggtacgaccgcgaggccaatgacgctgtcctgttcggcttcctcaccacctggttcctgggtgagttcctggcccagaacgaagagaagccgtatgtggttgcccacttccacgaatggttggctggcgttggtctgtgtctgtgccgtgcccggcgcttgccggtggcaaccatcttcaccactcacgccacgctgctggggcgctacctgtgtgctggcgctgtggacttctacaacaacctggagaatttcaatgtagacaaggaagcaggagagaggcagatctatcaccggtactgcatggagcgtgcagcagctcactgtgcccatgtcttcactaccgtatcccagatcaccgcaatcgaggctcaacacctccttaagagaaaaccagatattgtgacccccaacgggctgaatgtgaagaagttctctgctatgcacgaattccagaaccttcatgctcagagcaaagcacgaatccaggaatttgtgcgtggccatttttatgggcacctggacttcaacctagacaagactttgtatttctttatcgctggccgctatgagttttccaacaagggagctgatgtgttcctggaggcattggcccggctcaactatctgctcagagtgaatggcagtgagcaaacagttgtcgcattcttcatcatgccggcccggaccaataatttcaacgtggaaaccctgaagggccaagccgtgcgcaaacaactatgggacacagccaatacagtcaaggagaaatttgggaggaagctctatgaatcccttttagtggggagcctcccggacatgaacaagatgctggacaaggaggacttcactatgatgaagagagccatctttgccactcagcggcagtctttcccaccagtgtgcacccacaacatgctggacgactcctcagaccccatcttgaccaccatccgccgaattggccttttcaacagcagtgccgaccgtgtgaaggtgatttttcacccagaattcctttcttccacaagccctctcctccccgtggattatgaggaatttgtccgcggctgtcaccttggggtcttcccctcctactatgagccctggggctacacaccagcggagtgcactgtcatgggcatccccagcatctccaccaacctctccggctttggctgctttatggaggaacacatcgcagatccctcagcttacggcatttacattctggatcggaggttccgcagcctggatgattcatgctcacagctcacctccttcctgtacagcttctgccagcagagccggcgacagcgcatcatccagcggaaccgcacagaacggttgtcggacttgctagattggaagtacctgggccggtactacatgtctgcgcgccacatggctctggccaaggcctttccagaccacttcacctatgaaccccatgaggtagatgcgacccaggggtaccggtacccacgaccagcctccgtcccgccgtcgccctcactgtctcgacactccagcccacaccagagtgaggatgaggaagagccacgggatggacccctgggggaagacagtgagcgttatgatgaggaagaggaggctgccaaggaccgccgcaacatccgggcacctgagtggccacgcagggcctcctgttcctcctccacaggtggcagcaagagaagcaactcggtggacactgggccctccagctcactcagcacacccactgagcccctgagtcctaccagttccctgggtgaggagcgcaactaagctcccacccccatccccatcccattccctgcctgtcctgtgctcctctcgcagagggcctatgcagatgggagggtgcctgaaccccactccagactcttgagtgggacccctacccagtgtggtccatagcctaacctctgtttcagacactccagcccttgagctccaatcttggagttcccgcactccacgccgccgtgcctttcttggattgcaggatgcattctttgtgcactgatctggagtctccaggcttagactgggtcccagaggccaggcaggcatctgccattgttcttcaatgccagaggttttaggacacctggtttattggcttccaggctgtggcttcttcgtttgatcctataatcatacagagtatgctatgctcaggcctgcccctgggaccacctcatgttggattctgtgtggctaccctacacccgaatcagccaagttcagagttatgacatttcagggattaacataattgaaaatcagcctgcaaggtagctcagtagctctgtcgacagattgcttgcctagcatgcccgaagccctgggatctaactctagagcctcataaacctggtgcggtgatacacatctgtaatcccagcactcggtaggtagaggtagatggatcaagagttaaaggccatcatcctctgctacatagggagttcaaggccaaactgggcaacatgagacactgtctcaaaagcaaagtaaaggtggtggaatgctaaaaaaaaaaaaaaaaaa

SEQ ID NO: 356 - DNA, 1212 bp, Mus musculus
gcgacgagccagcactgagagagcaggcgcctgaggcgacagatcggcggccactggcccagtaccgggtccgtgaagggaaaagtccgggacacgattgccctcggtggcagggcggcccaatccaaactgccctggtccctgctcccgtcagtctaagaggctcgcagtcgcttggggcggccgccatcccgagggcggggctctgggaattgggtatctggaccgccgcggtctgttcctcccgccactcgcaccaggtggtgacaccatccagccggtgaccatgttcgacaagacgcggctgccgtacgtggccctcgatgtgatttgcgtgttgctggctggattgccttttgcaattcttacttcaaggcatacccccttccagcgaggaatattctgtaatgatgactccatcaagtacccttacaaggaagacaccataccttatgccttattaggtggaatagtcattccattctgtattatcgttatgagtattggagaatctctgtctgtttactttaatgtcttgcattcgaattcctttgtcggcaatccctacatagccaccatttacaaagccgtcggagcctttttgttcggagtctcagctagtcagtccttgactgacatcgctaagtatactataggcagtttgcggccgcacttcttggctatctgtaacccagactggtcaaaaatcaactgcagtgatggctatattgaggactacatatgtcaagggaatgaagagaaagtcaaggagggcaggttgtctttctactcgggacactcttcattctctatgtactgcatgctgtttgtcgcactttatcttcaagccaggatgaagggagactgggcaagactcttacgacccatgctccagtttgggctcattgctttttccatatatgtgggcctttctcgagtgtctgactacaaacaccactggagtgacgtcacagttggactcattcagggagctgctatggctatactggttgctttgtatgtatccgatttcttcaaggacacacattcttacaaagagagaaaggaagaggatccacacacgactctccatgaaaccgccagttcacggaactactcaaccaatcacgagccctgaagggtacaggggcgctggcccgcttcaaaggcaacagctggaggctaaaggcagggggatgcgtattacttcct

SEQ ID NO: 357 - DNA, 3406 bp, Mus musculus
agcccgcctgggagcggcatctccaggacgttactctgaaggaaggccagacttgtaccatgacgtgtcagttttctgtaccaaatgtgaaatctgagtggttcagaaatggcagagtccttaaacctcaaggcagagtgaaaacggaagtggaacacaaagtccacaagctgaccattgccgatgtccgtgcagaggaccagggtcagtacacctgcaagcacgaagacctcgaaacttcagcagagctcagaatcgaagccgaacccattcagtttacaaagcgcatacagaacatcgtggtgagcgagcatcagtctgctactttcgagtgcgaagtgtcctttgacgacgccatagttacctggtacaaaggaccaacagagctgactgagagccagaaatacaactttagaaacgacggccgctgccattacatgacaatccacaatgtgaccccagatgacgaaggtgtctattcagtaattgctcggctggagccaagaggcgaagcaagaagcacagcggaactgtacttaacaaccaaagaaataaaacttgagatgaagcctcctgatattcccgattccagagttccaatcccaaccatgcccatcagagctgtcccaccggaagaaatccctcctgcggttgctccttccatccctcttttgctgccattacctgaagagaagaagccgccagcaaaacgaattgaagtgaccaaaaagggtgtgaaaaaagataccaaaaaagttgtcacaaagcccaaagaagaggccccaccaccaccagtcccagaagttgccaagaagcctccacctcctactcccatgattccagcaaaagcttctgagattattgacgtgtcctctaaggctgaagaggtaaaaataacaaccatcaccagaaagaaagaggttcacaaagagaaagaggctgtgtatgaacgagaggaagcagtctacgaaaagaaagttcacatagagccttgggaagagccctatgaggaattggaaacggaaccatacacagagccatatgaagaaccctattatgaagaaccagatgaagactatgaagagatcaaggtggaagctaaaaagcaagtccacgaggaatgggaggaggactttgaagaaggacaggagtactatgagagagaagagggctacgatgaaggggaggaagagtgggaagagatttaccatgaaagagaaataattcaggttcagaaggaggttcatgaagaattacatgagaagaaaatcccagccaaagtgcctgaaaagaaagtaccacctcccaaagttgtaaagaagccagtagttgaaaaagttgaaaagactactcggagaatggaggaagaaaaagttcaagtcatcaaagtacctgaagtttctaagaagattgttccacaaaaaccttcccggactccagtgcaggaagaaataattgaagtgaaagtaccagctgtgcacacaaagaagatggttatctctgaagaaaagatgttctttgcttctcacacagaggaagaggtgtctgtctcagtccccgaggtgcaaaagaaaactgtcactgaagagaaaattcacgttgcagtttccaaaaagattgaaccaccacccaaagtccctgaaccacctaaaaagccagttccagaagaagtggtccctgttcccattcctaagaaggtggaacccccagcagccaaagttcctgaggctcccaagaaacctgtgccagaggagaaaaagccagttcctattcccaagaagaaagagccagctgcccctccacaagtcccagaggctccaaagaaacctgctcccgaagaaaagattcctgttcctgtgacaaagaagaaggaagcccctccagctaaagttcctgaagtgcagaagaaggttgtcacagaagaaaaaatagccatcattactcaaagagaggagtcccctccaccagcagtaccagaaataccaaagaagaaagttcccgaagaaaaaagacctgttcctagaaaagaggaagtccccccaccaaaagtgccagtgccacctaagaaagctgttcctgaggcggttgttccagctcccatccctaagaaagctcctccccgagctgaagtttctaagaaaactgttgtagaagagaaaagatttgctgctgaagaaaaactatcggtggcagttcctcagagagtggaactcatgcggcacgaagaggaggaatggacttactctgaagaagaggaaagagtgtctgtttcggtgtatagggaagaggaaagagatgaggaggaagcagaaatcacagagtatgaagtgttggaagagcccgaggaatatgttgtggaagaaaagatgcactttatctctaagaaagtggaagttgaaccagccaaagtgcctgagaagaaaattataccaaaaccaaaagttcctgctaaaattgaggagcctccacccactaaagttcccgaaccaccaaagaaaattgtaccagagaagaaagttcctgcaccagctcccaaaaaggtgccgccagccaaagcccctgaagaatcaaagagaccagttcccgagaagagggctcctgcagaagaggttgggatagaagaacctcccccaaccaaagtggccgaaaggcacatgaaaattacccaggaagaaaaagttcttgtggctgtaactaaaaaggaggcgcctccgagagcgagagtgccagaggaacctaagaaagttgcccctgaagaaagatttcccaagctcaaacctcgaagagaggaggagccaccagctaaagtgaccgaagttagaaaaagagctgttaaagaagaaaaggtgtccattgaagttccaaagagagaaccccgacccactaaagaagtgactgtgacagaagagaagaaatggtcttacacccgagaagaagaaactgtttcagaacatcgggaggaggagtatgaggattacgaagactatgaggagtataaagagtttgaggagtacgaacccaccgaagaatatgaccagtatgacgagtatgcagagcgtgaggtggagcactatgaagagcatgaggaatacgtcacagaacccaagaagcctgtcccagtgaaacctgcccaagaaccggtgcctgctaaacccaaggctcccccaccaaaagtgctaaagaaagctgtccctgaagaaaaagcacccctgcccattcaaaagaaactcaaacctctgccacccaaagctcccgaagaaccaaagaaagttgttgaagaaaaaatacagatttcaattaccaaacgtgaaaagcagcaggtgactgaaccggtcgccaaagtgcctatgaagcccaagagagttgtcccagaggcaaaaatacctgcccctacaaaggaagtggc

SEQ ID NO: 358 - DNA, 3294 bp, Mus musculus
ggagcgaggcgagcacgggccaagctgcgggattgacgtaacgagcttgggtttcccccagcgtcgggaacatggatgagaaatctaacaagctgctgctggctttggtgatgctcttcctatttgcggtgatcgtcctccaatacgtgtgccccggcacagaatgccagctcctccgcctgcaggcgttcagctccccggtgccggatccgtaccgctcggaggatgagagttcggccaggtttgtaccccgctacaatttcagccgcggcgatctcctgcgcaaggtagacttcgacatcaagggcgatgacctgatcgtgttcctgcacatccagaagactgggggcaccacttttggccgtcacctggtgcgcaacatccagctggagcagccatgtgagtgccgcgtggggcagaagaaatgcacttgccaccggccgggtaagagggagacctggctcttctccaggttctccaccggctggagctgcgggctgcatgccgactggaccgagctcaccagctgcgtgccggcggtggtggatggcaagcgcgacgccaggctgagaccttccaggaacttccattacattaccatcctgagagacccagtgtcacggtacttgagtgaatggaggcatgtccagagaggagcaacttggaaagcatccctgcacgtctgtgatggaaggcccccaacctctgaagagctgcccagctgctacaccggtgatgactggtctggatgccctctcaaagagttcatggactgtccctataatctggccaacaaccgccaagttcgcatgctatctgacctgactctagtgggatgctacaacctctctgtcatgcctgaaaagcaaagaaacaaagtccttctggaaagtgccaaatccaatctgaagcacatggcgttctttggcctcactgagtttcagcgcaagacccagtacctgtttgagaagaccttcaacatgaactttatctcgccgtttacccagtataataccactagggcctctagtgttgagatcaatgaggaaatccaaaagcgtattgagggactgaattttctggatatggagttgtacagctatgctaaagacctctttctgcaaaggtatcagttcatgaggcagaaagaacatcaggatgccaggcggaagcgtcaggagcaacgcaaatttctgaagggaaggttccttcagacccatttccagagtcagagtcagggtcagagccagagccagagtccaggtcagaatctgagtcagaatccaaatcctaacccaaatcagaacctgactcagaacctgagtcacaatctgactccgagttcaaatcccaattcgacccagagggagaaccggggaagtcagaagcagggctcaggccagggacaaggtgatagcggcaccagcaatggcaccaatgactacatagggagcgtagagacatggcgctaactggcactcaaaggcttgtgcacactgcttcccaaagcatcaccaaaaagatggcgtgtatcttacaagatgaaaatgtccaaacacatcctgcttccttcatttgggaagttcaaaaaaaaaaagtgtagacgttgcctttacagttgccttttgattcagtgttatgctgtgtgtgggtacaacaaatctcagtgtgtaattaaattgtctgttttgggatgaactacttctgaaatccaagagccaaaccagactcaccagaaattgcagcttagatattttaagacgttcttaaattaggtatgggagacacaaagaaaacatgaaatgtggccgtttaaacttatggctaagaaacagactttaagtgattccggatactctgttaaaactcagtcttgaaagcaccccccctccctgcagggaagtataagtaaaaacatgaacagaactaaaagacactcaaaactgttcatttccttgttttaacaaggagcctatttaaacagaaaaacaactgatgataaattttgccaaactgtagaaaataaacaatttctcacttaaatgtagctgggtttatgtaaaaataatggcttttcaaatagatcgggattcgtgtcttgtaacttaacagatgtttaaaatttagaatttttctaccttctgctgattaaaaggttttaaacagggtatatctcatattaacaaagcattttttccaaatggaataccaatggaaagatccagtttccagatggtttctgggcactgtaattccaacaatttcgatctttttggcgctgcttctcattcactttaaggcttctccgagttgtgctcattccaaatgaatccatgtatagaatttttcttcttcatctaaacaacgtgttgctaaatctcttgtgctatttaatcctggactaaagtcaggactttctatagaattgtcttatcaatgtctgtgtagtaaggtccttaagaagaactctcaaacagaataatttgtctcttaatattgctgaagttattattcttcatcagattgaactaaacctgaatgtgaactgttaattatcttgtttattgtaatgtttccagtttggctggctatttctggcccatggttcttttcttgtattgacagatttgtacacaataataagagcaaaaaattttctcaaagacaacagtagactaatcattaagatagccagagttgctcaataacaccaaaagctgcctcttgataattgaggggaacacttctaccaggattttgtttgtgaaagatcaaaaataaagaatgttttgcagcgaagctaagtgtcagggacgtgcaagtagaggagaatagtttgatagtctgcatctgtgaagagtattttgatggtttcaattacaaatggaacaaaggaagaattatatacacactgtgttgtgaaatatcatactgcttggcagtttacacctcatggttgttgctacacttctataagagcttacattaatcccttggctttcaatcaaaacaaggtgaccagaagtggtattcatgctttcaagagggacatgcttagaaatatgatcataaagtcacatctgtcatagtctgcccaagtgcatgacctggtttcatctgtaataatatggccacaagtttggcaagaagttgagtatctggctctaaagagattttcttgactctgagctctgtgacaatatttgcagcttttgttttgtggtatttgcagtgttgagaatgatgatacctaaaaaaaaatctaaaaaaaaaaaaaaaaaaaaaaaaaaaaaa

SEQ ID NO: 359 - DNA, 862 bp, Mus musculus
atgagcaaaggagaggagcacaagaagaagcacccggatgcttctgtcaacttctcagagttctccaaaaagtgctcagagaggtggaagaccatgtctgctaaagaaaaggggaattttgaagatatggcaaaggctgacaaggctcgttatgaaagagaaatgaaaacctacatccctcacaaaggggagaccaaaaagaagttcaaggaccctaatgcacccaagaggcctcctttggccttcttgttctgttctgagtactgccccaaaatcacaggcaagcatcctggcttatccattggtgatcttgcaaagaaactaggaaagatgtggcacaacactgcagcggatgacaagcagccctatgagaagaaggctgctaagctgaaggagaagtacgagaagggtattgctgcccacggagctaaaggagaacctgatgcagcgaaaaagggggtggtcaaggctgaaaagagcaagaaaaagaaggaagaggaagatggtgaggaggatgaagaggatgaggaagaggaggaagaagatataggtgatgatgatggataagttggttctagcgcagttttttgtctatatagtatttaacccccctgtacacaactcactcctttgaaagaaaaaaattgaaatgtaaaactgtgtaagatttgtttttaaactgtacagtgtcttcttttgtatagttaacacactacagagtgtgtctttagatagccatgccctggcagtattttcaatagccactaaccttgcctggtacagtctggggttgtaaattggcatggaaatttaaagcaggttcttgttggtgcacagcacaaattagttatatatggggaca

SEQ ID NO: 360 - DNA, 796 bp, Mus musculus
ggaaatcgcagataagtttttaattaaaaagattgagcagtaaaaagaattagaactctaaacttaagctaatagagtagcttatcgaaatattacttagtcttaataatctaagaagatcttaagagataacatgaaggcttatttaaacagtttgaaaaaggaaatgaggagaaaagtatttgtactgtataatggaggctgaccagagcagtttaggagattgtaaagggaggttttgtgaagttctaaaaggttctagtttgaaggtcggccttgtagattaaaacgaaggttacctaaatagaatctaagtggcatttaaaacagtaaagttgtagagaatagtttgaaaatgaggtgtagttttaaaagattgagaaaagtaggttaagttgacggccgttataaaaatccttcgactggcgcatgtacgtttgaaggcatgagttggaaacagggaagatggaagtgttaggctagccgggcgatggtggcgcacgcctttaatcctagcacttgggaggcagaggcaggcggatttctgagttcgaggccagcctggtctacagagtgagttccaggacagccagggctacacagagaaaccctgtcttgaaaaaaacaaaaaggttaggctagtatttggagaaagaagattagaaaatggaagtgaaagacgaagaagacatacaggaaggtgaagaaaaagctgttagagaagataggaaaatagaagacaaagcatctttagaagacagaaaaggtacttaaaggcacaggtagtaggaagccg

SEQ ID NO: 361 - DNA, 1790 bp, Mus musculus
ggctccttccatgcgagggcctgactctaccaccacccatggagccgcaggccgaggagcgaactctcggggagcctgcgcctccgccttctggcgccttggcgtcaccgacgccggacgaagaggagcggaccgagggcggcgcaccgccgacggcgactcccgcgggcgcatcgggggacagcacgagtgcagacgggctctgggggctgccggtggagcacgcggagcgcaggcccgagtgcggccgctgcagccggccccagaaagtgtgcttatgtccatatctcccagtgcgcccactccagatctctacccacttgtacataatccagcatccagcagaggaaagcagagtgttgcgcacagtccctctgctagcagcatgccttcccccagacagatgcacagtcaagattggccgccgcttcagtgaagagcgagatgttgaacttgcaactgtttgccgggactctggtacattaatattatatccaggggctgaagctactaatttggaagaatttatattagattctcctgtttatccttccacaatcatcctcattgatggtacatggagccaggctaaggacattttctataagaattccttgttccgacttcccaaacaggtgcagttaaaaactagcgtttgtagtcagtatgtaattcggatgcaaccaacaaacaggtgcctttctaccctggagtgcgctgctgttgctctttccatcttggagaaaaacaattgcatacaagagaccctgctccgcccccttcaagctctgtgttctttccagcttcagcatggcgctcagattcgcctcagcaaggaatatcttctgagaaacggattgtatcccaagccaatgccaaagaacaaacgcaaactcaggaagatggagctgttgatgaacagtgttaaaatttagcacgtctgtccctgtggtgctagtttacctgtcactggctgacaagactgtgttacatcttcccagtctaggctttcgctctgaagaatcgttggcccattcttgtgctgaaggacgagggctgctccacagcgccttatggttcacttccgttgactgtgaaaagcagtttcacactgcctctcgttttgtttttgtttttgtttttgttgtttttgttttttcaatacaaggtttctctgtgtagcctgtagaccaggctggcctcaaactcagagatctggctgcttctgcctcccaagttctgggctgaaaagcatgccccacctcttctagcttctgtatttgcttttaaacatgtgcttccaatactttttttttttttttaaagaatctattcaaaatacgattagtctagagtaaggagctgttgtttgtaaaatgaggaaaattgtgtctgggaacatgttcccgtcagtgtttataggtatgtaggtgtagatcactgatggaatataccccgtgaaactaatgtttcagcctagtgaatgaaattataagtgtgaagtaagtgacacagagggcagtttatgtcattaagtagtgtaagggaatagggagacgttactgtttacagttgtactcggactcagctaatgtgactcacgtcttctgttagcatctgaattcctgtggagacatataattttgaaataacctgcattctctatgggggatgctgtgcataactttcagtgttcactgagcaagctaactggtggtaagaggtttttgatgaagtttctacatggaaatgactgaagtaaattataataaagctatcattttaagaac

SEQ ID NO: 362 - DNA, 4749 bp, Mus musculus; identical to SEQ ID NO: 194

SEQ ID NO: 363 - DNA, 7106 bp, Mus musculus
gtcgccatcacttgtgagtttggcgtcatccattgtcaccaccaaggaatgtgcgctgggagataacaccaagggcagtgcttctcaaacacgcagagagctctttctctctctgcttccaggtgcgctcttatctggtcctctgtcccaagtttccagaacgtggaggcagcagcgcagaaccggtcaccgcgtccactgaacctcaggaccagactggcagttctcaacgatgggcaggagggacctcggcggcgacccctaaaacaataccatgcccggggagtccctctactgccgctctagcttcttccctttccacctcccggacccggttggattcggatgagctaaggagacaaggctgccagattacagactctgcataagcaagaaattcctaggctgctctccactggcctgactttctatagaagaaagaagatttgcctgcctggctggacttctcttaacagtacttcgcatcacgctttgcttgtgtcgaaaatcctgagttgtttttgcacatggaggaccactgcatgagggcaacctaggcagatcagactgaagacatcagaaagattgtgttaccatcttccctcagaccatttcctctaatagaagttctagactttgacagaacctggtccggtcattttgattttgctttctggtgttattgtttgttgtgcttttgtttttgatttatttttttccccatcacgttgcattttatttctgtcctccagaaatgggcctacagactacaaagtggcccggccgtggggctttcatcctcaaattttggctcatcatttccctgggactctacttacaagtgtcaaaactcctggcctgccttagtgtatgccgctgtgacaggaactttgtctactgtaacgagagaagcttgacctcagtgcctcttgggatcccggagggcgtaaccgtactctacctccacaacaaccaaattaataatgctggctttcctgcagagctgcacaatgtccagtcagtgcacactgtctacctttatggcaaccagttggatgagttccccatgaaccttcccaagaatgtcagagttctccatctgcaggaaaacaacattcagaccatctcgcgggctgctctcgctcagctcctcaagctggaagaactccacctggacgacaactccatatctacagtgggagtagaagacggagcgttccgggaggcgattagcctcaaactgttgtttttatcgaagaatcacctgagtagcgtgcctgttgggcttcctgtagacttgcaagagctgagagtggatgaaaaccgaattgccgtcatatcagacatggcctttcagaacctcacaagcttggagcgcctgatcgtggatgggaatcttctgaccaacaagggcattgctgagggtaccttcagtcatctcaccaagctcaaggaattttctatagtccggaactcgctctcccacccacctcctgatctcccaggtacgcatctgatcaggctctacttgcaggataaccagataaaccatatcccattgacagccttcgcaaacctccgtaagctggaaaggctagatatatccaacaaccagctacgaatgttaactcaaggagtcttcgatcatctctccaacctgaaacaactcactgcgcggaataacccttggttttgtgactgcagcattaaatgggtcacagaatggctcaagtatatcccttcttctctcaacgtgcgtggtttcatgtgccaaggtcctgagcaagtccgcgggatggctgtcagggagttgaatatgaatcttttgtcttgtcccaccacgactcctggcctacctgtctttaccccagctccaagtaccgtttctccaacaactcagtctcctactctctctgttccaagccccagcagaggctctgtgcctccagctcctaccccatcgaaacttcccaccatccctgattgggatggcagagaaagagtgaccccacctatttctgaaaggatccaactttccatccacttgttaatgatacttcgattcaagtcagctggctgtctctctttactgtgatggcctacaaactgacatgggtgaaaatgggccacagtctcgtagggggcatcgttcaggaacgaattgtcagtggtgagaagcaacacctgagcttggttaatttagagcccagatccacgtataggatttgtttagtgccgctggatgcgttcaactaccgcactgtggaagataccatctgttcggaggctaccacccatgcctcttatttgaacaacggcagcaacactgcttctagccatgagcagacgacttcccacagtatgggctccccttttctgctcgcaggcttgattgggggcgcagtgatttttgtgctcgttgtcttgctcagcgtcttttgctggcacatgcacaaaaagggacgctacacctcccagaagtggaaatacaaccggggccgacggaaagacgactattgtgaagcgggtaccaaaaaagacaactccatcttggagatgacagaaacaagttttcagattgtctccttaaataacgatcagctccttaaaggagatttcagactgcagcccatttataccccaaatgggggcattaattacacagactgccacatccccaacaacatgagatactgcaacagcagtgtgccagatctagagcattgccatacgtaacagcctagaggtccagcgttagaaaggtggacaaacaaactctcaagaacacacatacgtgtgcacataaagacacgcaaattacatttgataaatgttacccagatgcatttgtgcatttgaatactctgtaatttatacggtgtactatataacgggatttaaaaaaaaaagtgctatcttttctatttcaagttaattacaaacagttttgtaactctttgctttttaaaattaaaaaaaaaatgttgctgaagtactgtacggggttgtacaatgagaacccgatgccaaggcagaagaatgagcaaatcatccttaagatgcagattaaccacttcgctgttgaggctgtcagaacaaattcctttcctagagctgatagtcagatgaaaggataatgtcaggtgggctcatcagagtaagagggagagtttgagtaaagaaagaacggcctagttatttctatgttttctatacctcctggaagacacagtttgtgggaaataaatctataatataataattgaggaagttactccagtttgactgaatgcaggaactagaatatcatgaggaagccagttcccatgagataagttaggcctacttgaccaaatcaaggaaactgagagatttggaatgtccttaaagccccaaggttggctttctgactgtgaacttggaaatcactcttcaggcttccctggccttacgtgataacagattggaaacctgagtctcattcttggtgtcttcaggaaccagtaggatcagttctagcaagaaaattccccttaaaactgtcactgttcaaatcacatgtcaggttgaatcctatccaacagagttatattctagaataattttttagaagaggctaataaaaataatgggaagagttatattgaatgcaattatttttgataacaaaaattatttgggtatattcactgaggctatatcaacatgatatttagaccaacaaaggagcagtgttcagaatctactaccatgtgttgatttaaaaagtactaatgacatttagacaaaaatattggtggttctctttcactgtgtcaatggactctgtatcacgttgaaatagcttgaattaatacctatattctccctcaaattcttgtcttccgatcatcttgcatatatttttttgtaattaagttgtatatgccatctttgccccatgcccccactgaatatttcaaagaaaaatatggatgcaaattttggttgcacaaaatattcttggtgtatttttgcatattaaagcccatattaccattccttgccaatgattctgtgaaggcgcccaagctggccaaatcagtgcgtattgttaaaagcaatactatattttcattttgaattaactttgctcctgttccacatggaaattccatttgtttcttttagattgtggatatccctgtaatttggtaattatggaatgataattaaccatttggtaaaagactacccgtgaaaaggagtaagtcagagagtgaaagtttccccaaatcatggcagactaggctaaaagcagagggcatggtaggatagaggtacattaatggttgatgctagatatttttgaagcaagtccattttcaggaaacatgcataatttatcctaattcttgccatcacataggtgtagaagggctatagaccatatgtactgtctaaagaaattcacccgtggggactttttttttcaaagccacttttagacatttcattctctgctcctttaacatcatcctccactttagagacccgtgaaatcaatgtaatcctcttcttgctttctctctctctctctaagcaaaataaaactgtgatgtgtcttcttgtaaaatttaggtatacaatgctatgcaagcttttctttatagtgagagctttattttcgttaataatataccccaacttatatgttttaatctccctcatccctcagaataggcagaaaaatataactgcagtgataatgttatagacaaaagcattaaaactgtgcagtcaatagacctgaacatagttatgaattaatttaattaattctaaaatgactcgggtttcccctttagtctattagctcaagggtttgggctgttggtttctgtaaaagtaggttcacacagtaaagggataataccatctggaacaatgatcagtgtagagttacatcatctaaaaccaggacagtaatgtggggctctatgtggtagctggatgtttccctttcaatgtcctcatgcctctcactttgtaggtaaaactgtgtgctgaaaatataatggtactttgattattttgaggatttttattttcttatataagaagaaaatcattattgtctcttggtattgcatatttaactctcagtggtatttgggactgtggaaatgtcttctttgtcccaagaggaacgagagtggagtgattcccacaatattgtatggtgtccacaacactactgggagtccaagtggtactggggagggccagtcatgtgaaacaattagggtgctctcaaaattgctctggtagaaggtatttctgaaaccgagtctttattttgatctcataaacaacatgggacgggcatctaccatgaaaatcagtacctatccatagtactgtgcttgagggactcgcctacatcagattagaaatcacctcatggaatctatactagcatatgaaaatttgaaaaaaaaaaaaaccaaacaaacaaacaaattgccagcagtccttactggatgacattttggctgtcatctttaatcaggagactacattccatagttacatctcctctgattttggtcctctctcagcctcatcattacttattttgaggtaattagtcaaaagtcaaagttgagttgatcccatatattgtctactccttgtctgcccagtaactatttgcacagaggacattgcaaaaggcaaagcaaagcatgatcatacagatgttattggtagttaaatggaaggtgatcaccaatacatttttgctcatcaagatgcatttgaccctggggaggttctgggtttcacttaaacactgccatatgcactggagaggtagtacaacacatgcgtcaatcacagacaggcatgacaagagtaaaaatcctcccttgtgacaaataatgctatttgtaattttccagatgtttgttgatacaatattagacattttctcttgagagtaaaaacaaaatctgtaatatcaactttttgataaaaatgtattaatggcatagctaatattacacctttggtttttctttttttgaacaatggaggtcataatggtctaaggcatggcacacagccagaacttccttctccccttgagaaaacgtagctcttcatgtgaggggagcatctattccaaacacaaggcagcactgtttaattcagaggcaggtgccgcactggatcagcatacttcaagctgcagtgtcccctgcagctttgaacagtgaagtggttaatttccatagatgtctttatagcatttatctctgacctatcaaaagaggatattagatgttgctttagaacttgaggataacatatcagctcataactttttttttttttccccaaatgaatgggaaagtaaaacagaagagttcccaacacaaaaaatagtatttacataaaacaactctcaattcttagccttgttaaactttgctgttttaaaagttaaagtaagcgaagaaaggaagctgtatctacactgctttccagtttaatcagcgggatcgaaagaatagttggcaacagcgatgcttttcactgattgtggggggaagccttttgtacacagtataatactgttttagcaaaccaggctgttttgttatagtatttggttttctagctgcacatcacgagaagagcacaaaccaagaccatagcaacaggcattttaaaattaatataaaacatgcaaatccatgcatacacatacattggagtgtttgtaaaggtgtctatgggatgtaagatttgtaactacttatggcaaaatgaggcatcaccactgtataccctcctaggatgacatttctgaaagggtaactcttatgatctgttactgtttgaatcctatgttgatttaattctagtttgtgtttagtgtgtttctctgacaagggactgcaaggggctggaagattctgtgtcatgcatcctcggagacctaccatgttgcacactttgttaactacaaacttcactctacactatacagtaccttgttgatatattcagtaaaggcttattttaaaaaaaaaaaaaaaaaaaaaaaaaaaaaaaaaaaa

SEQ ID NO: 364 - DNA, 5989 bp, Mus musculus
gagatttctccaacccagctgcgccactgtggtgcctcgttccagctgtggtccacattcttcaggattctctgaaaagttaaccagagtttgagtgacagaatgacggacgcccagatggctgacttcggggcagcagcccagtacctccgaaagtcagagaaggaacgcctagaggcccagacacggccctttgacatccgcacggagtgcttcgtgcctgatgacaaggaggagtatgttaaggccaaggtcgtgtcccgggaagggggcaaagtcactgcggaaactgaaaacggaaagacggtgaccataaaggaggaccaggtgatgcagcagaacccacccaagttcgacaagatcgaggacatggccatgctgaccttcctgcacgagccggctgtgctgtacaacctcaaggagcgctacgcggcctggatgatctatacctactcgggcctcttctgcgtcaccgtcaacccctacaagtggctgccagtgtacaatgcggaagtggtggccgcctaccggggcaagaagaggagcgaggcccctcctcacatcttctccatctctgacaacgcctatcagtacatgctgacagatcgggagaatcagtccatcctgatcaccggagaatccggagcggggaagactgtgaacacaaaacgtgtcatccagtactttgccagcattgcagccataggggaccgtagcaagaaggaaaatcctaatgcaaacaagggcaccctggaggaccagattatccaggctaaccccgctctggaggccttcggcaacgccaagactgtccggaatgacaactcctcccgctttgggaaattcatcaggatccactttggagctactggaaagctggcttctgcagacatagagacctaccttctggagaagtcccgggtgatcttccagctaaaggctgagaggaactaccacatcttctaccagatcctgtccaacaagaagccggagctgctggacatgctgctggtcaccaacaacccatacgactacgccttcgtctctcagggagaggtgtccgtggcctccattgatgactctgaggagctcttggccactgatagtgcctttgatgtgctgagcttcacggcagaggagaaggctggtgtctacaagctgacaggggccatcatgcactacggaaacatgaagttcaagcagaagcagcgggaggagcaggcagagcctgatggcacagaagatgctgacaaatcagcctacctcatggggctgaactcagctgacctgctcaagggcctgtgtcaccctcgggtgaaggtggggaacgagtatgtcaccaaggggcagagtgtacagcaagtgtactattccatcggggcactggccaagtcagtgtacgagaagatgttcaactggatggtgacacgcatcaacgcaaccctggagaccaagcagccgcgccagtacttcataggtgtcctggacattgccggctttgagatcttcgatttcaacagctttgagcagctgtgcatcaacttcaccaatgagaagctgcagcagttcttcaaccaccacatgttcgtgctggagcaggaggagtacaagaaggaaggcattgagtgggagtttattgacttcggcatggacctgcaggcctgcatcgacctcatcgagaagcccatgggcatcatgtccatcctggaggaggagtgcatgttccccaaggcctcagacatgaccttcaaggccaagctgtatgacaaccacctgggcaagtctaacaacttccagaagcctcgcaatgtcaaggggaagcaggaagcccacttctccttggtccactatgctggcaccgtggactacaacattatgggctggctggaaaagaacaaggacccactcaatgagacggtggtgggtttgtaccaaaagtcctccctcaagctcatggctacactcttctctacctatgcttctgctgataccggtgacagtggtaaaggcaaaggaggcaagaagaaaggctcatccttccaaacagtgtctgctctccaccgggaaaatctgaacaagctgatgacaaacctgaagaccacccaccctcactttgtgcgctgcatcattcccaacgagcgaaaggctccaggggtgatggacaaccccctggtcatgcaccagctgcgatgcaatggcgtgctggagggtatccgcatctgcaggaagggcttccccaaccgcattctctatggggacttccggcagaggtatcgcatcctgaacccagcagccatccctgaggggcaattcattgatagcaggaaaggggctgagaaactgctgggctccctggacattgaccacaaccaatacaagtttggtcacaccaaggtgttcttcaaggcgggcctgctggggctgctcgaggagatgcgagatgagaggctgagccgtatcatcaccagaatccaggcccaggcccgaggccagctcatgcgcattgagttcaagaagatagtggaacgcagggatgccctgctggttatccagtggaacattcgggccttcatgggagtcaagaattggccatggatgaagctctacttcaagatcaaaccgctgctgaagagcgcagagacggagaaggagatggccaacatgaaggaggagtttgggcgagtcaaagatgcactggagaagtctgaggctcgccgcaaggagctggaggagaagatggtgtccctgctgcaggagaagaatgacctacagctccaagtgcaggcggaacaagacaacctcaatgatgcagaggagcgctgtgaccagctgatcaagaacaagatccagctggaggccaaggtgaaggagatgaccgagaggctggaggacgaggaggagatgaacgccgagctcactgccaagaagcgcaagctggaagatgagtgctcagagctcaagaaggatattgatgacctggagctgacgctggccaaggtggaaaaggaaaagcatgcaacagagaacaaggttaaaaacctaacagaggagatggctgggctggatgaaatcattgccaagctgaccaaagagaagaaagctctgcaagaagcccaccagcaagccctcgatgacctgcaggctgaagaagacaaggtcaacacgctgaccaagtccaaagtcaagctggagcagcaggtggatgatctggagggatccttggagcaggagaagaaagtgcgcatggacctagagcgagccaagcggaagctggagggagacctgaagctgacccaggagagcatcatggacctggagaatgacaagcttcagctggaagaaaagctcaagaagaaagagttcgacatcagtcagcagaacagtaaaattgaggacgagcaggccctggctcttcagctgcagaagaaactgaaggaaaaccaggcacgcatcgaggagctggaggaggagctggaggccgagcgcacagcccgggctaaggtggagaagctgcgctctgacctgtcccgggagctggaggagatcagtgagaggctggaggaggcaggcggggccacatccgtgcagatagagatgaacaagaagcgcgaggccgagttccagaagatgcggcgggacctggaggaggccacgctgcagcacgaggccacggcggcggccctgcgcaagaagcatgctgacagcgtggcggagctgggcgagcagatcgacaacctccagcgggtgaagcagaagctggagaaagagaagagcgagttcaagctggagctggatgacgtcacctccaacatggagcagatcatcaaggccaaggccaacctggagaaagtgtcccggacactggaggaccaggccaatgagtaccgcgtgaagctggaagaagcccagcgctccctcaatgacttcaccacacagcgagccaagctgcagacagagaacggggagttggctaggcaactggaagaaaaggaggcattgatttcccagctgacccgaggcaagctctcctacacccagcagatggaggacctcaagaggcaactggaggaggaaggcaaggccaagaacgccctggcccacgcactgcaatcatcccggcatgactgtgacctgctgagggaacagtatgaagaagaaatggaggccaaggctgagctacaacgtgtcctgtccaaggccaattcagaggtggcccagtggaggaccaagtatgagacggatgccatacagaggacggaggagctggaggaagccaagaagaagctggctcagaggctgcaggatgcagaggaggcagtggaggctgtcaacgccaagtgttcctccctggagaagaccaagcacaggctgcagaatgagatcgaggacctgatggtggacgtggaacgctccaatgccgccgccgcagccctggacaagaagcagaggaactttgacaagatcctggctgagtggaagcagaagtatgaggagtcgcagtcagagctggagtcttcccagaaggaggcgcgctccctgagcacagagctcttcaaactcaagaacgcctatgaggagtctctggagcacctggagaccttcaagcgggagaacaagaacctccaggaggagatctcagacctgactgaacagctgggagaagggggaaaaaacgtgcacgagctggagaagatccgcaaacagctggaggtggagaagctggagctgcagtcagccctggaggaggctgaggcctccctggagcacgaggagggcaagatcctccgcgcccagctggagttcaaccagatcaaggcagagatcgaaaggaagctggcagagaaggatgaggagatggagcaggccaagcgcaaccacctgaggatggtggactccctgcagacctccctggatgctgagacacgcagccgcaatgaggccctgcgggtgaagaagaagatggagggcgacctcaacgagatggagatccagctcagccaggccaatagaatagcctcagaggcacagaaacacctgaagaattctcaagctcacttgaaggacacccagctccagctggatgatgctgtccatgccaatgacgacctgaaggagaacatcgccatcgtggaacggcgcaacaacctgctgcaggcggagctggaggagctgcgggctgtggtggagcagacggagcggtctcggaagctggcagagcaggagctgattgagaccagcgagcgggtgcagctgctgcactcgcagaacaccagcctaatcaaccagaagaagaagatggagtcagacctgacccaactccagacagaagtagaggaggcagtacaggagtgtaggaacgcagaggagaaggccaagaaggccatcacagatgccgccatgatggctgaggagctgaagaaggagcaggacaccagcgcccacctggagcgcatgaagaagaacatggagcagaccatcaaggacttgcagcaccgtctggacgaggcagagcagatcgccctcaagggcggcaagaagcagctgcagaagctggaggcgcgggtccgggagctggagaatgagctggaggctgagcaaaagcgcaatgcagagtcggtgaagggcatgaggaagagtgagcggcgcatcaaggagctcacctaccagacagaggaagacaagaagaacttaatgcggctgcaggacctggtggacaagctacagttgaaggtgaaggcctacaagcgccaggctgaggaggcggaggagcaggccaacaccaacctgtccaagttccgcaaggtgcagcacgagctggatgaggcggaggagagggcggacatcgccgagtcccaggtcaacaagctgcgggccaagagccgggacattggtgccaagaagatgcacgacgaggaataacctctccagcagaccctcgctgtggccaatacacaataaacataacgttcgactattgataaaaaaaaaa

SEQ ID NO: 365 - DNA, 1391 bp, Mus musculus
cccgcggtgagtgacggcgccgccgccgccgccgccgcccagggtagcgcggagcctccgctccactgccccgccgccatggaccttttcggggacctgccggagcccgagcgcgcgccgcggccatctgccgggaaggaagcacagggacgacccgtgctctttgaggacctgcccccggccagcagtactgactcaggctctgggggacctttactctttgatgatcttccgcctgctgccagtggcaattcaggttctcttgccacatcaggttcccaggtggtgaagactgaagggaaaggagcaaagaggaaagcccctgaggaggagaagaatggcggtgaagagcttgtggaaaagaaagtttgtaaagcctcttcggtgatctttggtctgaaaggctatgtggcagagcggaagggtgagagggaggagatgcaggatgcccatgtcatcctgaacgatatcactcaggagtgtaatcctccatcatctctcattactcgggtttcatactttgctgtgtttgatggacatggaggaatacgagcctcgaaatttgctgcacagaatttgcaccagaacttaatcaggaaatttcctaaaggagatataatcagtgtggagaagactgtaaagaggtgtctgctagatacttttaagcacaccgatgaagagttcctgaaacaggcttcaagccagaagcctgcctggaaagacgggtccactgccacgtgtgtcctggctgtggacaacatcctgtatatcgccaaccttggagatagtcgggcaatcctgtgtcgatataatgaggaaagtcagaagcacgcagccttaagcctcagcaaagagcacaacccaactcagtatgaagagcgcatgaggatacagaaagctggagggaatgtcagagatgggcgtgtcttgggcgtgctggaggtatcgcgttccattggagatgggcagtacaagcgctgtggggtcacatctgtgcctgatatcagacgctgccagctgacccccaatgacaggttcattttgctggcttgcgacgggcttttcaaggtctttaccccagaagaagctgtgaacttcatcttgtcctgccttgaggatgacaagatccagacccgggaagggaagcctgctgttgatgcccgctatgaagctgcatgcaacaggctggccaacaaggcagtgcagcggggctcagcagacaacgtgacggtgatggtggtgaggataggacactgaggccagcacactggcgtgtgctcttgacttgcaggttcattttgtttgtgcacgctgtgtgtactcctgtgggacttccatggttgtaaataaaggtttctttttttcctaaaaaaaaaaaaaaaaaaaaaaaa

SEQ ID NO: 366 - DNA, 4042 bp, Mus musculus
ttggtcacggtgacgccgcgcgaagggcacggatcttcgggccgggaggacattcggcctctgtgagccgcaaccttgcccagcgagcggttgggtgttcgccatcttaggaggatgttctcgtccgtagcgcacctggcgcgggcgaaccccttcaacgcgccacacctgcagctggtgcacgatggcctgtcgggtccccgcagtcccccagctccgccccggcgttcccgccacctggccgccgccgccgtggaaggtgaggtcgcaccctgccctgtgggagcgctggttacatgctgcccccctgctctgcctcccgagtcctgggcaggaactggaggtcggggaaggacgcttcagccctggacccgaggaccggtctctcgctgaccctgggatggcaactctgacaccctaggccgctgtcggatccttggccctccctcaagggcgtggaagggcccaggcccagcgccactcagtgacctccgtgtcccgaagggagtagaggcagagaggtggtaaccaacttctttatcttcccccgtgagcccgcttggtcagccaagtatactgggtaaaatctctttttaaccactagccagacacagttgcaactccataacgtttatttgacttgcctttttaaaaattacctggaaaactctcctttgatctcctttcccaagttttatcttttcatttaattgtatatgaggtaatggggttgggaatctcttccttttgtgctactggttggtgaaggaggtgacttgcagattatatgaggtgtgcattcctttgagtttatgtttttgggatttgagctgggtgactcaataactgtatgttttaaatcctagtggaacataagtacaagagaaacccgaaagctgaattataggcctcaagagaaacgttacctacattgtgtgtgtaaaacagaagtccccacccacaccccagtcattcatgtgcttcatgcgtcttaaacgtgattagaaaactccttttcactatctcctatcgttttcctctgatttcaaaagctaaagcaaatctttgtatgtttttgactgcaggaactaggtatgacttacttagttcataagtgagtagttggttaatagctggagcaaacgttaaagttagcaagctttgcacatgttaagtgctctttttgattttgggctgtccttggagggtgctcttagtaactgcctttagttgaaattaccaatgcaggaagttttagaaaatagtatctcacagatactaataattttagtgatctgatttgacagtgactttcatgtcatttacattatatgagaactcatctttctacctagttgtggctggtggctaaagctgcatactagtgatagtactataccaaaaggaaatagtttttttttttccttcccctcgacttccttagtctctgaagaaataattgatcttttttcttcaatcaaacagagcagtatagctgtgaatatggatctggcagattctttctcctctgtggcctcggaggaattattagctgtggcacaacacatacagcattggttcctctagatctcattaaatgcagaatgcaggtttgtgttgcatgctggactaaaacgttctgttgaaacgtgagttgtaagatatagactgctactaacaagctgtgtggaaacctaattgcccaggaggtaagttgatgcacactaatacgagtccatattaaaatgcacggtgtgtcttgtcttattacagagtacagttgtgaatttggctccatgaagtattatgcactgtgtggctttggtggggtcttaagttgtgggctgacacacactgctgttgttcccctggacttagtaaagtgccgcatgcaggtttgtattgttggcatgagtggttttatttatattttattatttgctatgataacattttgattatgtaagttatatatgttatgtgggtgggtaggtgtggaaataaatagaccacttttgggagttctttacttaaaccatagggaacccaagcatagcactcaggttgacaggtttgacaggcaagtgtctgatactgacccgctgtgtcttgtgtatgtgatttaccttactaatgcaaagttgttttaaactaaagtacaattatattacttcttatccctttgctcccaacaacccctcccatacctccacctcccactctctcaaatcgatggtctcatttcttattattgttacataggaattatgctggaatcaaggtcttagtatgtgtgctaggagtgccctctaccactgagctacatttctagctttgtttagttttcaaaagatttctacttcatgtgtaagggtgctttgcctgcatgtatgtttgtgcatcacatgcctagtgtccaaagaagagggcatctgcttcactagaaaccgagttatagatgattgtgagccattatgtgggtgctgggaatcgaacccagaacctctagaagagcagctactgcttttaactgctgagccatcccttctgctccaattctgagctttttgttttgttttttcgagacagggtttctctgtatagccctggctgtcctggaactctgtagaccaggccggccttgaactcagaaatccgcctgcctctgcctcctgagtgctgggattaaaggcgttcgccaccacgctcaggttaattgttctgctcttactataagtggatcttaactgctggcattcagttctggccagaggtctttttcaaagcctactaattcaagacccccaagtagtcactgtataagtatttttggtatcaaagtggtcagtcagtcttgtgttatctcatgtgaactaacttcctgtccctaaatattgaggcaaagaacatgtttatttctcagaaaagttcttgttgtctttatagggaaagtgagcactgcctcttttgtgtttttataatttgaatatcataataattgaaaaaaagtaatgaaacattaaaaatttatttgtcccaaacaggattagaagtctccttacctaaaagagaaaggaagttgaaatattaggagggagagaggaaggtgatgtataccagcccttctagtaccggcagagagtgagataagctcccttacccacagtgttgttaaacaaatagataccaagtgtaagtcctgaaacatgcgtgtcttttggagtaaatttaatttctgaagtaaaagtgattctgtacctcagaggagatgctgtacctcttacaattgtgtctagttgggttatctgatgttcacagtggttcgtagtgcagtatcatctacgtaaaggactccgggatcaggaatacatacttatatcttaagagcaattttctttttggaattacatagttttttactgtccaagaattattataatttaaaggaagttagaccttgatatagaaacagtcctaaatagagcctgggagtgatggctcatgcctgcagtctagcctctgggaggcagaggcaggaagatcactgtgagttggagactagcctggactcctcccagtttgcctgggaagattgttcagtctgtagagtgtttgttatgtaagcctgaagaacttaggtgagaccctcaggcacctgtgtgaaaagtcgggcatggtcatgcacctgtaacctgtataatcctagcactgccaaggcggatagagagggtccccggaggtcgctggccagctaggctggtagagacaggaacagtggtagaagagattccaaagtaaagggcagttcccaacattgacctctggcctccacatacatgctcacagaagcatatacacaggaatataccacacaaaaaatttaaaaacataggtgtttagcttatattaagctaagaactttcatataccttttgtagttaaattttaaaacaaaaaagcacagtagtagaataaagtttttgtgaaaggtgttagatattcttaaatcttaatttataaaactcattataaataacttggc

SEQ ID NO: 367 - DNA, 1272 bp, Mus musculus
aaatatacaatggaccctgaattgccacagttcattcaagccaaagttaatgccatcaacatgagtgatgctcattacaaagcagactggaagaaaacgctggccaagggttacgacttgagaccagatgccattcccatcgttgctgccaaaagttcaaggaacatcgctagtgactgcaaatacaaggaggcctatgagaaagccagaggcaagcaaattggctttctcagtcttcaggatgaccctaagctggttcactacatgaatgtggccaaaatacaatcagaccgtgaatataagaagggatatgaggccagcaagacccggtaccacacacccctggatatgttcagtgtgactgctgcaaagaaatctcaggaagttgcgaccaacagcaactacaggcagccctaccacaactacaccctcttgcctgatgccttgaatgtggaacactccaggaatgccatgcaaatccagagtgataatctatacaaatccgacttcacccactggatgaaaggtatcggctgggtccccatagactccttggaggtagagaaggcaaagaaagctggggagattctgagtgagagaaagtatcgccagcaccccgagaagctgaagttcacatattccatggacaccatggaacaggcacttaacaaaacaaacaagctgactatggataagaggctgtacactgagaagtggaacaaagacaagaccagcattcatgtcatgcctgacactccagacatcttgctctccagagtaaaccagatcacaatgagtgataaactctacaaggctggctgggaagaagagaagaagaaaggctatgatctcaagcctgatgccatcgcaataaaggctgcaaaggcctccagagatattgccagtgattacaagtacaagcaagcctatgaacaagccaaagggaagcacattgcgttccgcagcctggaagacgaccccaagctggtgcacttcatgcaggtggccaagattcagtcagaccgggaatacaagaagggctatgagaaatccaagacatctttccacaccccggtggacatgttcagtgtggtggcagccaagaagtcccaggaagtggccaccaacgccaactacaggaacatcatccacacctacaacatgcttcctgatgccatgagctttgagttggccaagaacatgatgcagattcaaagtgataatcagtataaggcagactatgccgacttcatgaagggcattggatggctc

SEQ ID NO: 368 - DNA, 1217 bp, Mus musculus
gccttccaactctccatcgccatggccgccgacatcagccagtgggccgggcccttgtgcttgcaggaggtggacgagccgccccagcacgccctgcgggtcgactacgccggggtgacggtggacgagctgggcaaagtgctaacgcccacccaggttatgaacaggcccagcagcatttcatgggacggccttgatcctgggaaactctacaccctggtcctcacagaccccgatgctcccagcaggaaggatcccaaattcagggagtggcaccacttcctggtggtcaacatgaagggtaatgacattagcagtggcactgtcctctcagattatgtgggctccgggcctcccagtggcacaggtctccaccgctatgtctggctggtgtacgagcaggaacagccgctgagctgcgacgagcccattctcagcaacaagtctggagacaatcgcggcaagttcaaggtggagaccttccgcaagaagtataacctgggagccccggtggcgggcacgtgctaccaagccgagtgggatgactatgtgcccaagctgtacgagcagctgtcagggaagtaggggtgctgcacaggggcccccacagccttgttaagttgtgtaaagcatgctcttccccccgcccccttgctaccctctcattgggagttcttagctgtgctaggatagaggtttagggtgtcttccctcttgctgccagccgtcacgattctggatagtcccatcccaggttctgtttgattgagtttaggttccgtctggggaggggtctaatgttctgatggagtcattctgttgttgatataaaaaaagcaactctgaaaaaggaagcactccgccaggatcaggtctagaggagagctggagctggtggtgtctgtgagtggttgaacaaggaaactgtccagaaccgggcacagtggggtctttaagggccctgtcccccaactgagacaactcaagactcccatcttagctgagccctgactgtccagatcaggtggctgcgtaggtatcaagtgtctaaagaacagtgctgctgtggagagagaccctcttaagccccttgcttctcagtggggtaggcaaaagtcacctgagctgccgagtgtgttgatcctccttgtcaagtacaaataaaaaggcattgcattcagaaaaaaaaaaaaaaaaaaaaaaaaaaaaaaaaaaaa

SEQ ID NO: 369 - DNA, 559 bp, Mus musculus
gatcctgttttcgttggccacgctctgatggcggtcactgctggagctctgtccatttcgtaggaccggtcctcgctcggtaccgtgagagcttgctgcctccctcctttgtcctcttcataggcctgcgcatcgtccccgagggcgcaggccttctgctggccggcagcatgggccgggagtctcgccactaccgaaaacgctcagcatctcgaggtcgttctggaagtcgatcgaggagtcgctcaccctctgacaaaagaagcaaacgtggggatgacagacgctctcggagcagagacagagaccggaggagagagaggtctcggagtagggacaagagaagatctcggtcaagggacaggaagcgcctgaggcgctccagaagtagagagcgagacagaagccgagagcggagaagatctcggagcagagatagaaggcgctcaaggagtcgaagccggggcaggcggtcccggtcctccagtcctggcagcaaaaccaagaagactgagaacaggtctaggtccaaagagaaagcagaaggtggggacagctc

SEQ ID NO: 370 - DNA, 6615 bp, Mus musculus
gtctctgttgagaagcttcctctgtgcttaaaatctacaagaagcactgaaaactcaagtcgcagaggcgcgcgctctgatttggttgtttaccatcaatcagacggttgcttggcagacactggatggttatgagcctgaacaagctgaaaggggcaggaaaagaagtggaggcagcattcttcctatttaaagctgcaccgcttgaaaaaagttttcgcagactgtgccggacctggtgctgaaacagactgaggcagcgcggggactggtgctgaaaaagagcccccagcggaattcatggtgctacagtgacctcagtatctactcttcgatcccaggaggacccacatgtctcatatttagacatgatggcaaactgggtgggagcaagacctctcctcattctttctgttttattagggtactgtgtctcaataaaagcccaggaacaagagaatgatgaatatgatgaagaaatagcctgtactcaacatggacagatgtatttaaatagagacatttggaaaccttctccatgtcagatctgtgtctgtgacaatggtgccattctttgtgacaagatagagtgcccagaggtgctcaactgtgccaatcctataacacccactggggagtgctgtccggtgtgcccacaaactggaggtggagatactagttttggtagaggaagaaagggacaaaaaggagaaccaggattagtgcctgttgtaacaggtatacgcggtcgtccaggacctgcaggccccccaggatcacaaggaccaagaggggaccgaggccctaaaggaagacctggtcctcgtggtcctcagggaattgatggagagccaggtgtgcctggtcagccaggtgctccagggcctcctgggcacccctctcacccaggacctgatggcatgagcaggcctttttcagctcagatggctgggctggatgaaaaatctggacttggaagtcaagtaggactcatgcctggctctgtgggtcctgttggcccaagaggacctcagggtttacaaggacagcaaggtggtgtgggacccgcaggacctcctggtgagcctggcgagcctggaccaatgggtccaattggttctcgtggaccagagggcccacctgggaagcccggagaagatggtgaacctggaagaaatgggaatacaggtgaagtgggattctcaggatcaccaggtgctcgaggcttccctggtgctcctggtctccctggcttgaaaggtcacagaggacacaaaggtcttgaaggccccaaaggtgaaattggagcacctggtgctaagggtgaagctggccccactggtccaatgggtgctatgggccctctgggaccaagaggaatgccaggagagaggggaagacttgggccacagggtgctcctggaaaacggggtgcccacggtatgcctggaaaacctggaccaatgggtcctcttgggatacctggctcttccggttttccaggaaatcctggaatgaagggagaagcaggtcctactggagcccgaggccctgaaggtcctcaggggcagagaggtgaaactgggccacctggtccagctggctctcagggtcttcctggtgcagtggggactgatggtacacctggcgccaaaggccccacaggctctgcaggaacctctggccctcctggcttggcagggccccctgggtctcctggccctcaaggcagtactggacctcagggaatccgaggacaatcgggtgatccaggagttccaggtttcaaaggagaagctggtccaaagggagaaccagggccacatggtattcagggtcccattggtccacctggtgaagaaggcaaaagaggtcctcggggtgatccaggcacagttggtcctccaggaccaatgggagaaaggggcgctcctggcaatcgtggttttccagggtctgatggtttacctggaccaaagggtgctcagggagagcgtggtcctgtaggttcttcggggcctaaaggaggccagggagatccaggacgtccaggagaacctgggcttccaggtgctcggggtctgacaggaaatcctggtgttcaaggtcctgaaggaaaacttgggcctttgggtgctcctggggaagatggtcggccaggtcctccaggctccattgggatcagaggacagcctggaagcatgggccttccaggccccaaaggtagcagtggtgaccttggaaaaccaggagaagcaggaaatgctggtgtgcctgggcaaaggggggctcctggcaaagatggagaagttggtccttcaggccctgtgggacctccgggcctagctggggaaagaggagagcagggacctccaggccccactggctttcagggacttcctggacctccagggccacctggagaaggtggaaaggctggtgatcaaggtgttcctggagagcctggagcagttggcccattaggacctcggggagaaagagggaatcctggagaaagaggagagccagggataactggactgcctggggagaaaggcatggctggaggacatggccctgatggtccaaagggcaacccaggtccaactgggaccattggagacacagggccaccaggtcttcagggcatgccaggagaaagaggaattgcaggaacacctggccctaagggtgaccgaggtggcataggagagaaaggtgctgaaggaacagcaggaaatgacggggcaaggggtcttccaggtcccttgggacctccaggtcctgcaggccctactggagaaaagggtgaacctggtcctagaggcttagttggccctcctggctcccgtggcaatcctggttctcgtggtgaaaatggtccaactggagctgttggttttgctggaccccagggtcccgatggacagcctggtgtcaagggtgagcctggagagccaggacagaagggagatgctgggtctcctggaccccaagggctagcaggatcacctggcccccatggtccacatggtgttcctggactgaaaggcggtagaggaacccagggtccacctggtgctacagggtttcctggttctgctggcagagttgggcctccaggccctgctggagctccaggacctgcagggcccgcaggagaacctgggaaggaaggacctcctggtcttcgtggtgaccctggctctcatgggcgagtgggagatagaggaccagctggcccacctggtagcccaggagataaaggggacccaggagaagatggacaacctggtccagatggtcctcctggtcccgctggtaccactgggcaaagaggaattgttggaatgcccggacaacgtggggaacgaggaatgcctggccttcctggcccagcgggtacaccaggaaaagtaggaccaactggtgcgacaggagataaaggtccccctggacctgtaggacctccaggttccaatggtcctgtaggagaacctgggccagaaggtccggctggtaatgatggtaccccaggacgggatggtgctgttggagaacggggtgaccgtggagaccccgggcctgctggtctaccaggctctcagggtgcccctggaactcctggccctgttggtgcccctggagatgcaggacaaagaggagagccaggttctcgaggccctgtaggaccacctggtcgagctggaaagcgtggtttacctggaccacaaggacctcgaggtgacaagggtgacaatggagacagaggtgaccgaggtcagaaaggccacagagggttcactggcctgcagggtcttcctggacctcctggtccaaatggtgaacaaggaagtgctggcattcctggtcctttcggtccaagaggtcctccaggaccagtaggtccttcaggaaaggaaggaaaccctgggccacttggaccaattggacctcctggtgtgcggggcagtgtaggagaagcaggaccagagggtcctcctggtgaacctgggcctcctggccctccaggtccccctggccatcttactgctgctcttggtgatatcatgggacactatgatgagaacatgccagatccacttccagagtttacggaagaccaggcagctccagatgacacaaacaaaacagaccctgggatccatgttaccctgaagtctctcagtagtcagattgaaaccatgcgtagccctgatggttccaagaaacacccagcccgcacttgtgatgatttaaagctttgccatcccacaaagcagagcggtgaatattggattgatcctaaccagggatcagctgaagatgcaatcaaagtttactgcaatatggaaacaggagagacatgtatttcagcaaacccagccagtgttccacgtaaaacctggtgggccagcaaatcccctgacaataagcctgtgtggtacggtcttgacatgaatagaggatctcagttcacatatggagattaccagtctcctaacacagctatcactcagatgacctttttgcgtcttttatcaaaagaagcctcgcagaaccttacttacatctgtaggaacactgttggatatatggatgatcaagctaaaaacctcaagaaagctgtggtccttaaagggtcaaacgacttagaaataaaaggagaaggaaacatcagattcagatacacagttcttcaagacacctgctctaagcgaaatggaaatgtaggcaaaactatctttgaatacagaacacagaatgtggcccgcttgcccatcatagatgttggtcctgtggatattggcaatgcagaccaggaatttggccttgatattgggccagtttgtttcatgtaacagaagcccagacatatcgacaatgagcactaccatcaatgaccaccacaagaactgtgactgtttaaagttcatcctgagactcttgaagtaatggctggtcctgcatcagctttgtacatacgatctgaagtgcctgaccaccttatccttcagaatatttattttacttacaatcctcaagtttaattgacttaattttttcaatatggccgtttagattaaagcaaccaatgacaatgaccatctttacaaaaagtaaactgatcaaaaaataaatatgttttcatcaattcatttcactgtaatgaatacgttgcttagtatttatgagaaaattcttcttcctagcaggtagcttacatgatggggtatgtaaagcctcagcatgtgttgattttgcttggctgcagtctgaaaagtagagagtaatgccccctgtgtcctcttattgtcagaacatcagtgacaaatgaagacccccatgcatgtcttaatattatactaacattatagaaaaaattaaggtgaatataacacgtttccactgtcttaaatgatatctttaaataacatgtaaccattgacttttaggaggaaaaaaatccataaaattgcttcaactttacaatttattttgcaaaaactgatacagttagagttttttcctcattcaaatttaagggtaacattttctttttgttgtaatctttcaatacagatagaagttatatttgtggtttcctatgtaagaagatattggatgaaattaaaaaaaattacccacacaattttctaacacacgtgcccagtaatgaatgttaagactctcccacagtcacagtctcattttcctgaagcatatcataagaaatgaacaagaagtccagcattataatgatcactcaaataaaatgtgaggattggaattagaacattcataagaaaatatgacccaacatttcttagcatgacctacctcatctctgcaagctgggatagatttcctgttcttgtttatttttaggtgttgaaaggtgctatgcttctgttgttattccaagactggagataggcagggttaaaaatattataacttttcttttaatgatggtgctaaaattatttctataaaattctttaaagataaagattgtttcatcaatgctatttgtgaacacagaactgttaaacatcccatttgagagatagatcattattcctgggtcttttaactgttccttttatgatgtatttagaacattgtgtaatgcttgcaagtgtcttaacctaggacacataggtccccttgtgtctcaagattttttccttaattgcagttgtttgctccattgttgtttcttacttaaataatctgggccatcccaaaggacaaggcccacatagaactttgatcatgtatctctgcaaagcatcgaattaaatgcatgcttctgtcatgtcagtcatcttcagtttgttgaatcctttgaacatattaggtccttttagtttccaggagtgaaaactaagatctcctggtagtttttgttcacaatttagtagacgatgcaacaagtacctaccattttgtctgcactggcttaaaaataaacctatctgtaacattgcctgcaaaggcatgttgacatcaatgaagacagtctatgcgttagaaaactcaggctagtgattggtaaagagtaaaggaaatgaaaaatccattattgaataaactaataataaaacatgc

SEQ ID NO: 371 - DNA, 4929 bp, Mus musculus
aacaaattgaaaaggtgattttattgaaaaagtctcatgagcatgctcaccatttcaatgatataatagatgatggttattggaacagcccaaatatttaccacagagcaagagatatagcttgagcggctaccagacaatcccagaaccaaggaatggatgactacaggtatcgggacaactatgagggctatgcccctagtgatggctactaccgtagcaatgagcagaatcaggaagaagatgcacagagcgatgttacagaaggccatgacgaggaagatgagatctatgaaggcgagtaccaaggcatccctcatccagatgatgtcaagtctaagcagaccaagatggcgccctccagagcagatggtcttgggggccaggcagacttgatggctgagaggatggaagatgaggaggagctggctcaccaatatgagaccatcattgatgagtgtggccatgggcgcttccagtggaccctcttcttcgtcttgggtttggccttgatggctgatggagtggaaatatttgtagtgagctttgctctgccaagtgcagagaaagacatgtgtctgtccagttccaagaaaggaatgcttgggctgatagtctacctaggaatgatggcaggggccttcatcttgggcggcctggctgataaactgggaaggaagaaggtcctcagcatgtcactggccatcaatgcctcctttgcttcactctcctccttcgtgcagggatatggagccttcctcttctgcagactcatctcaggcatagggattgggggctccctgccaattgtttttgcctacttttctgagttcttatcacgagagaaacgcggtgagcatcttagctggctgggcatcttctggatgactggaggcatctatgcatctgccatggcctggagcatcattccacactatggctggggcttcagcatggggactaattaccacttccacagctggagagtgtttgtcatcgtctgtgctctgcccgccactgtgtccatggtggctctgaagttcatgccagaaagccccaggttcctgctggagatgggcaaacatgatgaagcctggatgattctcaaacaagtccatgatacaaacatgagagctaaggggaccccggaaaaggtgttcacggtttcccacatcaaaactcccaagcaaatggatgaattcattgagatacagagctcaaccggaacttggtaccagcgctggctggtcaggttcatgaccattttcaaacaggtctgggataacgccttgtactgtgtgatggggccctacagaatgaacaccctgattctggctgtggtctggttcaccatggccttaagttactacggcctgacggtgtggttccccgacatgatccgctatttccaggatgaagaatataagtctaaaatgaaggtgttttttggtgagcacgtgcatggcgccacgatcaactttaccatggaaaaccagatccaccaacatgggaagcttgtgaacgataagttcataaagatgtattttaaacatgtcctctttgaggacacattctttgacaaatgctattttgaagatgtgacatccacagatacgtatttcaagaactgcaccatcgaatcgaccaccttctacaacacagacctctacaaacacaagttcatcaactgtcggtttatcaattccacctttctggagcagaaggagggctgccacatggactttgaagaggacaatgattttctgatttacctcgtcagcttcctcggcagcctctctgtcttgcctgggaacataatttctgccctgctcatggacagaattggaagactcaagatgattggcggctccatgctcatctctgcagtctgctgcttcttcctgttttttggcaacagcgagtctgcgatgatcggctggcaatgcctgttctgtgggaccagcattgcagcctggaatgctctggatgtgatcacagttgagctgtatcccaccaaccagagggccacggccttcggcatcctcaacggactgtgcaagtttggggccatcctgggaaacactatctttgcttcttttgttgggataaccaaagtggtccccatccttctggctgctgcttctctggttggaggtggcctgattgcccttcgattgccagagactcgagagcaagtcctgatgtgaccaacccaccgggaaaagacagatgggaagatctttttcaggacactccagcacagccacgcctcctgcctctcactgtctacaggataccgcggacagcacggaaggagaaatggactttgtgatccctagtttaggacccactgcagttaatacatttttaactcaggtgattgactaggggtgcccagaaccatccttgggatcccagagctgtgtgcttagcttcaggtctcttcatcccaggcagggagaggacactccagtaaacacacacagtaagcaaggagtatatgctcctctaaatgaggtgcaaaaaactatttgcatttcggactgaagttgaggactagaaccacttaagctcctccatgcagcttctgggagcccagtgacctagcagattgtcatagtggggagtggggtcaacacatactgggctcagagagcagactacgtatttgcatttgaaagtatcacctatcatattttccttttgaaaactggcacagtagccttgaggatactctgatatagaaaaacccaacctttaagcaaaatgtatatagacggacttttcttcccaagcatcctgaactttgcataacgaagaggtgatacactaagaactatatttattatggttttgctcttgtcagagcaacgtgaggatgggtattatgtaaactaagtttgtatataagagttttgaggttttattcccacaaatggtggctgctaaggttgccaacattttagccatatttggggaggactctccattcaaggtcgcaggaaacttggtgcgaatgggtagcatcttgcttgctgtccggaggatgtacttggcaagccacgtgccatttcctttacctgggaacttttcttcaaattggtagggcaggtacttctctctcctgtgttgctcatttgtgaaactcaggaccataggttgtttgatgctgtttacccagagagaacaggaagaaatgaaatgaaaatgtttttatttttattattggctgcttgcactccttttctttagagagaaccccctcacagataactgactaaggatggggaaaggtaaccacagttcttcaaaatgtgagttcttcctgtttgatttcaaagaaaaacacaatgtacatttattatagtgtttaggacctatgagaaatttatgctctgtgtgttggctcggggcgttcgaaacaggccattagcatgcacattaggaaataaaaggcatgagatacattcgtttcttcattgctccaaggaagctttttctgagatccaggttggaacttgaatgtggaaaggggagagggggtcagggctgctctggcaggtgccagcagtctggaggctaggctgagggagtggcttttgttcatcagtaccctctgcaatggtagagacagagctaggagttcctgccacctgagctgctcttacctgggccagcagaacgactgactgactgactgtaagaactagtttgctcacgttatttgcagcacacacacaagctgtgatgtgctaatctctacctattagaaatcttcccaaatctaaaccaaactaatgactacattgagtgttttctcagttctgtggaaatacttagatgccaggccagttcaagccatctttgcctagtcctctggaatataagttggcagtgggaaagagtgaaatctttgagaacttcccattttcaagtgtggctaacatgtttactctgcttctctggtccccacctctttatttacaccaccattactttctgtccagggaaggaagatgcatcaggtctgatgtgataacccccattactccaaatataaatatatataaatatacagaatgtattaatgcttctctcggtgttttataggaattaactgataacgctctgttgataacgagaaactttctgtaatatagctgtgatgtccttttccattttcttgtgatatggaatgcattgcttaggatcatgagagaattgtataaatctgtggttatgtatccctcataacagtgttctttaatgggataatagacctcagtgctcagctaccactcaagaaatgtacgagacagttagaatccacatttacagtcagatatatcttgtaaactttaaatctgactaatttttaaagcacaggagtggctgcagttattttaggctaactgttcttggtttctaagctctgtcttctacattacatttatggctccttaacctgtttgcctaaccaaccaagggcaattcccgtccatccatcacacgggatgtgagaaggatgcagccatggtctgcagcctctctcatgaagggttatctggccatggtacttggctgcttcataacttgctgtcactcctgatgagataagtgtgtctttaaaaatagtccccgtgtcaggtcactggggtgtaatgtacaacatccttagccatccattttttcttttctttttttttgccctgagagactcccaatggcatctatagaggactaaagaagagagccgttccctcactgagtcagactgttcacagttcattatgtattttatgatggcttgtttgggagccgatactttcagcagtctcaactgtgttgtgggatctcctgatgctggtttctgagcttttgttttattaaaactgattagtgaaaaaaaaaaaaaaaaaaaaaaaaaaa

SEQ ID NO: 372 - DNA, 3380 bp, Mus musculus
aggagtggcagcgcgagggtgaaagagacgcacaagtggatcctaaagtccttcccggaggagaggggctgcccggagggaagggacggagtgcgcggagtcagcgcgggcggctgccactgtcgctgccactcccggggccggagggacgtggtcaggctgccagggcgtgatggggccgcggccagagcctcgctgactaccggtggcgggaggaagggacccggaacagcccacgggggggatgccaagaggcaggccgtttcctgcacccagcacctaagcagctggggtccgtgcaccccgcggggacggctctggctcggagcgtggcccatgtcctgcgcgggtgaagccctcgctcccgggcccgcggagcagcagtgcccggtcgaggcgggcggcggccggctgggctccccggcccacgaagcatgtaatgaggacaatacggagaaagataaaaggccagctaccagtggccataccaggtgtgggctgatgcgggaccagtccatttggccaaatccttcagctggtgaacttgtcagaacccaacctgaacgtctgcctcaactccagacatcagcacaggaacccggcaaggaggaaacaggcaagataaagaatggcggccacacaaggatgagcaatgggaatggaattcctcacggagccaaacatgtgtccgtggagaatcacaagatatcagcccccgtttctcagaagatgcacagaaaaatccagtccagcttgtctgtaaacaatgacatcagtaagaagagtaaagtaaatgctgtcttttccccaaaagcagcctcctcacccgaagactgctgtgtccactgtatcctggcatgcttgttctgtgaattcctgaccctctgcaacattgtcctgggacaagcttcgtgtggcatctgcacctccgaagcctgctgctgttgctgtggcgatgagatgggtgatgactgtagctgcccctgtgacatggactgcggcatcatggatgcctgttgtgaatcgtcagactgtctagaaatctgcatggaatgctgtggcatctgttttccttcataaaagatttatctcttgtttttactaaaactggagacaactttacaatatttcttgtaggggaaagaaaggcgcatggtaagactcccatgaaacaactcagtatttgcactgttttttgtagacccattccttctaagtaagctctgaaattcttcctttcgccggatgtatgtggtttaatatgtgaagttttgactgtctaattggttttttgaaacttcttcatagatgacaataattggaagacattttgacacacacagcctaaaatgttaaatgtcttctttctcttgacatgtctgttttcgctaaccattctgagcagctctttgctctaaacacaacattgctcagtatgtatttaagccagatcactttgatgtttatctattggaggttaaaagcaaacttttttttaattctaagtaagcacaaacattgggcagagccgtaaacagatgtgggactctccgtgttggtctcctctgggcttttcagctctcttgttctgccagagtgctctgaagaagatcacattgctctcatccagagcggcaggaagtgtaatggaagcaagcaggatgggagctgtaaaggatgaaccaggtttcaaagcatgctggcttcaagactgtaaaggcaagaggccataggaacatacagaagtgaataacaggttacagaagaaggcctggaggaagatatggcactgtggatgctctaggaccagctacttgaatttaaggaaatgttgaaggtacacagcctagactgtcagtgctttggacaagtgaaaaggatttgccttgtatatcgcagcaacacagctttcttagaactgtaaaatctcaactaatgcaaatacgcactttcctacatgtaatttaagtgttataaattttaatgaaaacataataccttgttaacataactatattttaccaaaaaatgtagaacactttttaacaacgttcatttaaatgagctggttttttttccttttttttaagattaaaaaaatcccagtattccttggggtttttccaaagctgccttatatttggaaagactcggttctttatcatgcaggggtgggggggggcggggttctatttattttcattggcttgtagtcctagccatgttgtctttcataaggaggtgagttttggatccactacaggaggacttccgacgtccaacaccatccaccaggtatcaggattccaactgtgtgtgaaattatgccaagtgacaggttataaagatactaaagtacgaagaagaggggctgcaatgagactaattctacagtgatggagtcagctcatgtggaggggagagtttggattcacacacaccctcccgtgggcgttttccctttctctccagattttaaaatttggttatattgactgattccttgtaggctcttgagagtatgttgttgttagtggttctttctagttccagatgaatattagattgttagaaataatgcaatcttaagaagccattagccagcctaggcctttaggagacttaaactttttttctttttcatgaagaatggcgacatcaccagtgtctttcctttgaaagttagcttagcttataattaaattattattttaaatattctttgaaaaagaaaagctaatccgtctcctttctagtgcaatttccacgtgcatacactttaaatacgatgctaatgtacagctgccttcctcctcgtctttgaaacagaagctttgattcgctgcgtcaaatataatggcaaccttagtatttccacatacccaatgctagtgtgtgcttatatcataggatgaagaagtgccatctgtttatggataagcctcctaatgattgttaaaatatttgcctcattatcctgtaaaactgtttaaccaagaggcttgtctgatgcttgaatatatcttgctatgatttgcaatgaaaatgttagtgcattcgacatgtttttctgtaatagagagcattagtgaacaccagaatttaatttccatacttgtacaggtaggactattcttcagctctctactccaggcaagccattccttaaggcatcttgtataattcaaaagaaaaataggcaaatgtgaaaacagttttagcatattttagaattttggcatgtaaagtgttttgttgaaccttatggccgtcaagactaattgctatagtttacacctagatattccatctctttttaaacgtggcatattttcaaactggatcctgactattttaaaattaaaaagaattatgatgac

SEQ ID NO: 373 - DNA, 8033 bp, Mus musculus
gcagcagcagcatctgcagcagggtggctgtctggcactgccttttgcattttgggcaggttctgagattgagagcagtcccaggcagatccaaggtgccagcatttcccaccagcccatgctaatcctctgcacatttgctttcgtgtattagctgtgaggcagtttgctggggggaaaaaaaacgatactttcacagtcttggtgcatctgaggtgtgtcatcttggttttgcaccacccacccttcctgttctacacggggagcctggatcctttttcttttttgtcagaccgttgggcaggaacggattctagtgtaacagcctggcacttccttctgttccggtgccggtaactgcttgtcgtgaagatggtccagaggaagcctgtgtctgacgagccaaagaagctgatgtggggatggtgtagagatcgctagaagtctggatgtgcacacttcggggatgggctgcactaccagcgtgattctcttcaaaggcatccgtaccgtttttgagagaaactgtgcttacatgtgcaagcagccgggagagagtaatgcccttgaatatacagcatacaattggtcaaaagaagactctgaactatcgatcgccttctgcctggcaaagccaaagctgatcgagccactggactacgaaaatgtcatcgtgcagaagaagacgcagatcctaaacgactgcctgcgggagatgctcctcttcccttatgatgacttccagacggccatcctgaggcggcaggggcggtacttacgctccacggtccctgcaaatgcagaggaggaagcacagagcctgtttgtcactgagtgcatcaaaacctacaactctgactggcatcttgtgacctataaatatgaagattactcaggagagttccgacagcttccaaacaaagtgcccaagctggataaacttccggtccacgtctatgaagtcgatgaggaggccgacaaagatgaggatgctgcttcccttgggtctcagaagggcgggatcaccaagcatggctggctgtacaaaggcaacatgaacagtgccatcagcgtgacgatgaggtcattcaagaggcggtttttccacctgattcaacttggcgatggatcctataatctaaacttttataaagatgagaagatctccaaggaaccgaaagggtccatattcctggattcctgcatgggtgtgatccagaacaacagagtcaggcgcttcgcttttgagctcaagatgcaagacaaaagcagttaccttctggcggcagacagcgaggcagagatggaggagtgggtcactgttctcaacaagatcctccagctcaactttgaagccgcaatgcaagaaaagcgaaacggggaccctcatgaagatgacgagcagagcaaactggaaggttctggttccggtttggacagctacctgcctgaacttgccaagagcaccagagaagcagagatcaaattgaaaagcgagagcagagtgaagcttttttacttggacccagatacccagaaacttgacttctcatccgctgaaccagaagtgaagccctttgaagaaaagtttgggaaaaggattctcgtcaagtgcaacgatttgtcctttaacctgcagtgctgtgtcgcagagaatgaggaaggacccacgacaaatgtcgagcctttctttgtcaccctgtccctgttcgacataaaatacaaccgaaagatttctgctgacttccacgtggacctgaaccacttctcagtgcggcagatgctggcccccacgtccccagctctgatgaacggtggccagagcccacctgccttccaggatgcccttcatacagccatgcagtatccgaagcagggaatattttcagtcacgtgtcctcacccagacatatttcttgtggccagaattgagaaggtcctccaaggaagcatcacgcactgtgctgaaccgtatatgagaagctcagactcttctaaggttgcccagaaggtgctgaagaatgccaagcaggcatgccaaagactaggacagtacagaatgccattcgcctgggcagcaaggacgttgtttaaagacacctctggaaacctggataaaaacgccagattttctgccatctaccggcaagacagcaataagctttcaaatgatgacatgctcaagctgctcgcagacttccggaaacctgagaagatggccaaactcccagtgattttaggcaatctagacattacaattgacagtgtttcctgtgacttccctaattatctaaattcatcatacattcccatgaggcaatttgaaacctgcagtaaatctccaatcacttttgaagtagaggagtttgtgccctgcatacccaagcacacccagccttatacagtctacagcaatcacctttatgtttacccaaaatacttgaaatatgacagccagaagtcgtttgccaaggccagaaacattgctatctgcattgagttcaaggattctgatgaagaagactctcaacccttgaagtgcatttacggcagacctggtggcccggtgttcacgagaagtgcccttgccgcggtcctacaccatcagcaaaacccagaattctacgatgagatcaagatagagctgcccgcccagctgcatgagaggcaccatttactgttcaccttcttccacgtcagctgcgataactccaccaaaggaagcacgaagaagaaggacgctgtggaaacgcaggttggcttttcctggctgcctctcctgaaagatggaagggtgttgacgagtgagcagcacatccccgtctcggctaacctgccatctggctacctcggctaccaggagctcggcatgggcaggcattatggtccagaggttaagtgggtggaaggaggcaagccactgttgaagatctccactcatctggtttccacagtgtacactcaggatcaacatttacataattttttccaatactgtcagaaaacggaatctggagcccaagcctcagggagtgaactagtaaaataccttaagagtctgcatgcgatggaaggccatgtgatgatcgccttcttgccgaccattttaaatcagctattcagagtcctcacaagagccacccaggaggaggttgctgtgaacgtgacacgggtcattattcatgtggttgcccagtgccatgaggaaggattggagagccacttgaggtcatatgttaagtttgcctataaggctgagccgtacgttgcatctgagtataagacagtgcacgaggaactgacgaaatccatgaccaccattctcaagccttctgccgatttccttaccagcaacaaacttctgaagtactcttggtttttctttgatgtgctgataaagtccatggctcagcatttgattgaaaataacaaagtcaagttactgcggaaccagagatttccggcctcctaccatcacgctgtggaaaccgtggtgaacatgctgatgccacatatcacccagaaatttcgagataacccagaagcatctaaaaatgccaatcacagcctcgctgtgttcatcaagagatgcttcaccttcatggacagaggcttcgtcttcaagcagatcaacaactacatcagttgctttgctcccggggaccccaagactctctttgagtacaagtttgagtttctccgcgtggtgtgcaaccatgaacactatattcctttgaatttgccgatgccatttggaaaaggaagaattcagagataccaagatctccagcttgactactccttaacagacgagttctgcagaaaccacttcttggtgggactgttgctaagggaggtgggcactgcgctccaggagttccgggaggtccgagtcatcgccatcagcatgctcaagaacctgctgataaaacattcttttgatgacagatacaattcgaggagtcaccaggcaaggatagccactctctacctgcctctgtttggtctgcttattgaaaatgtccagcggatcaacgtgagggatgtgtcacccttccctgtgaacccgggcagtatcgtgaaggacgaagccctggctgtgcctgctgggaatccactcatgactccgcagaagggaaacacacttgaccacagcctgcacaaagacctcttgggcgccatctctggcattgcttctccgtatacagcctcaacccccaacatcaacagcgtgagaaatgccgactcaagaggctctctcattagcacggactcagggaacagccttccagacaggaaccccgagaagagcaactctctggataagcagcagcagagtggcatgctgggaaattccgtggttcgatgcgacaaactggaccagtctgagatcaagagcctgctgatgtgtttcctctacgtgctgaaaagcatgtctgacgatgccctgtttacatactggaacaaagcttcaactgctgaattgatggatttctttacaatatctgaggtctgcctgcaccagttccagtacatggggaagcgatacatagccagaacaggaatgatgcatgccagattgcagcagctgggcagcctggataactctgtcacttttaaccacagctacggccactcagaggcagatgtcgttcaccagtcgcttctcgaagccaacatcgctactgaggtctgcctcacagcgctggacaccctctctctcttcacactggcttttaagaaccagctcctagctgatcatgggcataatcccctcatgaagaaagtttttgacgtctacctgtgtttccttcaaaaacaccagtcagaaatggctttaaaaaacgtctttactgccttaaggtctctaatttataagttcccctcggcgttctacgaggggcgggcggacatgtgtgcctccctgtgctatgaggtcctcaagtgctgcaactccaagctcagttccatccggacggaggcctcccagctgctctacttcctgatgaggaacaacttcgactacacaggaaagaagtcttttgttcggacgcacttacaggtcatcatctctgtcagccaactgattgcagatgtggttggcattggaggaaccagattccagcagtccttgtctatcatcaacaactgtgccaacagcgaccggatcatcaagcacaccagcttttcctctgatgtgaaagatttgactaagaggatccgcacagtcctgatggccacagcccagatgaaggagcacgagaacgaccgggagatgctggtggacctccagtacagcctggctaagtcctacgccagcacccctgagctcaggaagacgtggctagacagtatggcaaggatccatgttaaaaatggggacctctcagaggcggcaatgtgctatgtccacgtgacagccttggtggcagaatatctcacacggaaaggcatgttcagacaggggtgcacagccttcagggttatcacaccaaacatcgatgaagaggcttccatgatggaagacgtcggcatgcaggacgtccatttcaacgaggatgtgctgatggagctgctggagcagtgtgcggatggactttggaaggcggagcgctacgagctgatcgctgacatctataagctcatcatccccatctacgaaaagcggagggatttcgagagactagcccatctgtatgacacgctgcaccgcgcatacagcaaagtgacagaggtcatgcactcgggccgcaggctcctggggacctacttccgggtggccttctttggacaggcagcgcaataccagtttacagacagtgaaacagatgtggaggggttcttcgaagacgaagatgggaaggaatacatctacaaagagcccaagctcacgcctctgtcagagatttctcagagactccttaaactttactcggataaatttggttccgaaaatgtcaaaatgatacaggattctggcaaggtcaacccgaaggatctggactccaagtttgcctacatccaggtgacccacgtgaccccattctttgacgaaaaggagttacaagagaggagaacagagtttgaacgatgtcacaacatccggcgcttcatgtttgagatgcccttcacccagaccgggaagaggcagggtggcgtggaggagcagtgtaagcggcggaccatcctgacagcaatacactgcttcccctacgtgaagaagcggatccctgtcatgtaccagcaccacactgacctgaaccccattgaggtggccatcgatgaaatgagcaagaaggtggccgagctccgccagctctgctcgtcggctgaagtggatatgatcaaactgcagctcaaactgcagggcagtgtgagcgtccaggtcaatgctggtccgctagcatatgcccgagccttcctcgatgacaccaacacaaaaagataccctgacaataaggtgaaactgctgaaggaagttttcaggcaatttgtggaagcttgtggtcaagccttggcagtgaacgagcgtctcattaaagaagaccaactggagtaccaggaagagatgaaggccaactacagggagatggccaaggagctctccgacatcatgcgtgagcagatgggatgatttgccccctggaggagaagacaagcgtgctaccaaattccctgcacatcttcaacgccatcagcgggacaccaacaagcacagtggttcaagggttgaccagctcgtcctcagttgtgtgattttacctcatgaaccgtgtgtggggacatgctttgtcatgtgcaaactcaggatgacttccagagctaatcactggtgtggccaagcacaggaagaagccatggggaatgggagagagaaggagcctggactgtgatatttaatagcagattttataggagtcgggggaaggtgcacatagttttttaaatctcactggcaatatttagttttcctcatgtcttaacaggtatatgtggatactcttgagctgaagttcagttttattcttcttacagtatagtattaaaataaatggtctaaaggaaaagagggaaagtgtgctgggacacctgtggcaggtgtcctgggatacctgtagcaggtgtcctgggacacctgtagcaggtgtgctgggacacctgtagcaggtgctgggacacctgtagcaggtgttgctgggactgggacacctgtagcaggtgttgctgggactgggacacctgtaacaggtgttgctgggactgggacacctgtagcaggtgttgctgggactgggacacctgtagaaggtgtcctgggactgggacacctgtagcagacaaagcagcactgaacctggggttggggactaagctggaaaaatcttgaaaatatttttctccctggggcacattcaggttgagtacaagaactatttttgtgtctaattttgatgacggaaaggaattgcctattgtaattttgtactagtgaatgaggagacttagagcctttatattcatgccttgtgttggcaacatgagcacttcagaagctgagtgtgagcctaagcctagtcagcattatagaaccaaaggcctgtactagcaaacacacccatgctaaaacctaaaaccccatgtacatactgactgtcaatacagcctccttgctatgtccacacactcaccacatttctacacttttaatacgtcagtgtccatgttaagtttattattcgtggcccatttgtgctgttctcagtatatgcaaacacattggacttcactgtttattcttgtacataagaagtgcaatatggagatgtatacagtctttgctatattaggtttataaactgttttaaaaaaattcatccttttgccaaaatgatgaactaagtgattggtaaaccctaagccctgtatgagtggagggatagtttaaagttttcaccatgttatattttcttttgagactttaatttagtaattttatatttgggaaaaaaaataaaggtttttaatttaactgg

SEQ ID NO: 374 - DNA, 3685 bp, Mus musculus
gttaaaatagcaataaaagcggccactgcacttggtatagattttctgtgatatgagtttgatttgttgtgtcttttgcctgtaacagtagtaatcctgtttcaacttttcttttgtggtatttcacctaaattccgagctgtatgactgcatttcttgatgttgagtctgctcctgtcggcatggcagcccacccaaacatgcggacctattatttctgcaccgatacaggaaaggagatggagctgtggatgaaggccatgttagatgctgctctggtgcagacagaacctgtgaaaagagtggacaagattacaactgacaatgcatcaaccaaagaaaccaataacatccccaaccacagagttctcattagacccgaggtccaaaaccatcagaagaataaggaaatcagcaaaattgaagaaaaaagggccttagaagctgaaagatacggatttcagaaggacgggcaagatagaccattaacaaaaattaacagtgtgaagttgaactccctgccatcagaatatgaaagcgggccagactgcccacctcagaatgtacactacagacccatcaatgtgaatagttctgacggcaaagcggtgaatgtcagcttggcagatgtccggggtgggagtcacccaaatgcagggcccctagccacagaggccgaccgagtcattcagagaacgaattcaatgcaacagctagagcagtggattaaagtccagaaaggacggggtcttgaagaagagcccagaggagtaatttcttatcaaacattgccaagaaatatgccaagccaccgagcccagatcctggcccgctgccctgaaggttaccggacactcccgagaaacagcaagaccagacctgagagtatctgcagcgtaaccccttctggtcatgagaagacagggccgggagcagaagagaagcggcgatccatgagagatgacaccatgtggcagctgtacgagtggcagcagcgccagttttaccacaagcagagcaccctccctcggcacggctgcctgagcagtcccaaagccatggtgcaggtgtctgaccagacgatgcactccatccccacgtcaccttcccacgggtcagcagctgcttaccagggcttctcccctcagcggacgtacaggtcagaagtgacctcgcccatccagagaggagatgtgacgatagaccgcaggcacaggcctcatcaccctaagcatgtctatgtagctgacagaaggtcaatgccagctggcttaactttacaggctgttagtccccagagcctccaaggcagaacgctgtcacaagatgaatgtagaggcacattatacaaatacagacctgaagaagcaggtattgatgccaaattaagcagattgtgtgaacaggataaagtggtccgagcgctggaggagaagctgcagcagctgcacaaggagaaatacacgcttgagcaagccttgctgtcagccagccaagagatagagatgaatgctgataacccagctgccattcaaactgtggtgttgcagagggacgacctgcaaaacggactgctgagcacgtgtcgggaactctcccgagccactgctgagctggaacgagcctggagagaatatgacaagttggaatatgatgtgactgttaccagggaccagatgcagggtcagctcgaccgccttggagaagtgcagagtgagtcggcaggaattcaacgggcacagattcaaaaggagctctggagaattcaagatgtcatggaggggttgagcaaacacaaacagcaaagaggctcttcagaaacagtaggtctggcaggatcaaagcctttctcatcagttaagtacaagagcgagggtccagattatagactctacaagagtgagccagagttaaccacagtggcagaagtcgatgaatctaacggagaagaaaagtcagagccagtttctgagaccgaagctccagtcgttaaaggttcccattttccagtcggagttcctctgagaacaaagtcacccacacccgagtcctccacgatagcttcctatgtgaccttgaggaagactaagaagatggtggagctaagaacggaaagaccaagaagtgccgtggagcagctgtgtctggctgagagtgctcgacctagaatgactgtggaagagcagctagagaggatcaggagacaccagcaggcctgcctgagggagaagaagaaggggctgagtgtcctcggtgcttccgacccgtcagacgtgagggacagtccactcaggcttactcagactctaaggagggatgataacgttaaggagctagacaccgtccacagagaaaatgatgtaaagccagactacgagactccagcagcacagtatgctcacctagaagacgctgaaccccagaatgcagacatcggcagaaagctaaaaagatctgaaagtattttttatgaaatgctttacacacctgaaccaaatggaatggcttctgaggaagtgacggagaaggaaagacagaaagagcaggtgcatgccgatgggtcatgcagccctcaggaagagacggccatgacagagcatcagatggaaggcccccctgaggaagcagagagtcttcatgaggaggaagaaactcttgcttcctgtgagccagctcctgagattcctagggagaatcaaaccacagtgagaagtctgtccccgtctcctgactcctccacggcagcagatccgcccactcctcctcagctcagggaaggatcgcatttcatgtgtgtgtagtcgcagaactgcactggcgtctgttgagagctcacagagctgaagctgtggacctcagtggtgtaagaagatgtacaatataccttaactctatgaaattcatagttcggatgctgctgaccacagagcatcgttttatcacctttggaaaatgtttattccaaactagctttaatggcccgtacatgcactccgtagtgtcaaggtcaccgtcctccgcagtccgcccacccgcccgcttgctgctatttgagttcagagcgtatcagtcaggtgctttctccctcatgctccatcagagcttgcttggttgcagttcccaggtctggatgcttaagtctcagtgaacttgggtctcttgcttttcagtgaggctatgctttccttcgaagcttgtttgcttccctcctttttttcttcccattttggcttctgcagtacttcatttgacacttgatttgtaaaaattttatataaatatatttaaaatgtgccattttctcactgctcagtgaagtctgtcctgttttctgctctaacccctcctcagtgagactgcaccatcagcagtccctgcctcgctccgtctgcttccacacaaatgctgttgcttagctttcctttcaaaagccaaacaattacaagcgtaggtattttgaagtactggacatttatgtcattgggatagatgtgtacagcaataagcaggcttttagatccagtacttggtttgtgtacagatgtaattatgttcattgtgtggaagttacacagtgaacacatgtaataaggctgcttactagagtttaatgcaaatgttcatagctcatttctttttttatcatgttaaataaatgttgatgttcttaaaaaaaaaaaaaaag

SEQ ID NO: 375 - DNA, 1407 bp, Mus musculus
gagaatcctccgaagagttgctgaggcagaactgaaatcatggcttgcctcaaagaagcagctgtatcggctgctaatgacgcctcagcacagaaagacgatgctcctttaactcaggggttttaatgggaagtttcggagcctgagagacaacagctttagagctgggtgtgccatcagctgctcgctgctacctctctgtctcctgcttgaactcagcctggccgggaagaatggaaaccagacaggcttttaactacctgtaactgtttcaccaggagatgaatcaagcgtttgcccagccagatcagataactcagcccctccagggagcagccaccatgatctctgcaaactgatgatggaagaaaggggaagcagaagatactgtgctctggattccctggacgatggatggaggacagcctgttccttcacccctggtaccccttgggaacggatcagattatagcatgtctctggaacagaaaacaacattcgtttttgtgatcctgttgttcatctttttgggcatcctcattgtcaggtgcttccgaattcttctagacccatatcggagcatgccaacctcaacatgggctgatgggcttgaagggctggagaaagggcagtttgaccatgcccttgcttagtggggacacagtaggctgccctcccaaggagcaaatcttcctctttgttaatgttcttaacaaatccaattttaaccatgaatggccctaggataacaacccattatttcataaacctgctattgtgttaaaggtgtcttatttgaggataatggaaagtttctattactagagcccaagtaggaaggtgcaagcatttatgtctactcaatgaatgttgttgaagatattgtaaaaccaagcgcaccaacaagcgcaccaacacttgcgaagatgtcgctgtcaaatgaagcactctctgctcagaacaagtaatgagtaattagagaagatcgggtatgagtctgagtacaagtcatgtctctcaattttactttgtgctttgtgcacatttatgtcctgggcagggtgaggaagcctgtgtagagacgacatcaaggggctacttatttcttgcaaagcagggggctccaggaagcagtggtaggcttaggaaaaatagttatttacctggtaactctggatgggaatgctatcattttcactaccagtcctaatccaatctctgtattcctatagctaacacatttaaatgcactgatgtataatttgaatctactgtacttacatttgtgatggaacttataggttacaagcacaacttcaaggttatatttttaaaagaaagatgatcgcttatcaaaaagactttggctttaagaggagtatgcatttttatgtgcacatagttacc

SEQ ID NO: 376 - DNA, 1604 bp, Mus musculus
ggacgtcgccgggccgcgccgccaccgcgtgacgcacttcctgtttgttgttggagaaaagaagagaaaggaaagcgcgaggagacgccgccgccgccaccgccaccagcgcagctgtgccacagccgcgaggagaccggccgcctgacttccctcctcgctggccgccgtgtcctcggatttattccaacagtcagttaaaacatggtggattactatgaagtgctgggcgtgcagagacatgcctcacctgaggacattaaaaaggcgtatcgaaaacaggcacttaaatggcacccggacaaaaatcctgaaaataaagaagaagcagagcggaagttcaaacaagtagctgaggcatatgaagtgttatcggatgctaaaaagcgggacatctacgacaaatatggcaaagaaggattaaatggtggtggaggaggaggtggaattcattttgacagtccatttgagtttggcttcacattccggaacccagatgatgtcttcagggaattttttggtggaagggacccattttcatttgacttctttgaagacccatttgatgacttttttggaaaccgaaggggtccccgaggaaatagaagccgaggtgccggctcatttttctctaccttcagtggatttccttcttttggaagtggatttcctgcttttgatacaggcttcactccatttgggtcactaggtcatgggggtctcacttcattttcttcaacgtcatttggcggcagtggaatgggcaacttcaaatcaatatcaacttcaactaagatagttaatggcaaaaaaatcacgacaaagaggattgtggagaacggtcaagaaagagtagaagttgaagaagatgggcagttaaagtccttgacaataaatggtaaggagcacctgctacgcttggataacaagtaactcaacgcacgcatttaacagaaatgttaaaccataacaagcaccatttgaggaataacaggaactttttttttgaagatttgaaacgaactcgactttctgtataactgtacctaaactaaagtatttataaaaaagctcattggagcctccatctatcagatttttgagtttgttgttgggaccacaaaataggaccttattttctatttcttttgtccttaaaattgttgtaatctctgtatgcactttgctttaaaccaatcgtaatctgaggtgagccctgtgacttttgagtagtgctaggaagagactgtctgtaacaccagcatggatctgcttcccattgtggtgaattgtgagtgagtagtgtcagcctgctgtggacttaacattgccagatgaatctacagaaatacttcaattttattttcagtatttagtgatgaaagctattactgcatcaatggtaatacatttctggtttagtgtacactaaggatgttttctagttgtgcatggatgtcggcaacctcgtcagtttgactattgtttaaatatgtaatgttaagcttaggtttaaaaaagctggtaatttgggtttttgtcatttgcttaaaaaaaaaaataaatgcgaatgtgtttggtgcattctttcatgagtggggtct

SEQ ID NO: 377 - DNA, 21233 bp, Mus musculus
caggtgcaagtcttagctgcagtcccggacgccatcttggaactgctgccacacccgctcctcacatctccctcttttttctttttctgccttttttcttttctgacctccctgggtgcccggggtccccgtagcagcattgaggcgttcctgcaataaaggctgttgagaagaatccgaccatgttgtgtcttccttgccggccaaggtggccgcaacatactgatccaacagggagcagacaaatttagctgggaatttgggactttcatttaggaaggaatgaactcaagaagtctaaggtttgaacaagagctacagaaagggaaggatatccgtggaagccaatggttttccggaagaaaataaccccgttgccttgagtttgtaggtgccactactactctggaaaaatggcggatgaggaagagtatgaggaggtgatagagtactacacagaggagacagtttacgaagaggtgccaggagagacaattacagaagtctatgagaccacaacgacaaggacatcggactatggccaatcagaaactgccacaccagcgctggcacagccacaaccagcaaagccggtggagcggaagaaggtcatccgaaagaaggtggactcgtccaagttcatgaccccctacattcaacacagtcagaaaatgcaggatcttttcagctcaaataaatacaaagagaactatgagaaagcaaagggacagccatacgccatcacaagtgatactccagaacttcgcagaatcaagaaagtccaggatcaactcagtgaggttaagtatcgaatggatggagatgttgctaaaactatctgtcatgtggatgaaaaagcaaaagacattgaacatgctaagaaagtgtcgcagcaagtcagcaaggttttatacaagcagaactgggaagacaccaaggataagtacctgcttccccctgatgcccctgaacttgtccaagccgtcaagaacacagccatgttcagtaagaaactgtacactgaagactgggaagcagacaaggcattgttttatccctataatgacagtccggagctgagaagggtagcccaggcccagaaagcactgagtgatattgcctacaaaaaaggactcactgagcagcaaactcagttcacgtccctgcctgatcctcctgaggtcgaatttgccaagaaagtaaccaaccaagtgagcaagcaaaaatataaagaagactatgagaagaaagtcaaaggaaaatggagtgagacaccatgctttgaaattgcaacagccagaatgaatgctgacaatctcagctcaaggaagtatcaggaagactttgagaacatgaaagaccagatctacttcatgcagaccgaaacacctgagtataaaatgaataaacaggctggagtcgctgctagcaaggtaaaatacaaacaagactatgaaaagaataaaggaaaagcagactataatgtactccctgcttcagagaacccactgctcaggcagctgaagacagctggaaacgtcctcagtgataaactatacaaggaaaactatgaaaagaccaaagcaaggagcatcaattactgtgagacccccaagtttcagcttgacacagtgctacagaacttcagtagtgacactaaatataaagattcctacctaaagaatatcttgggacactacgtgggcagctttgaggacccgtatcacacacactgtatgaaagttacagcccaaaatagtgataaaaactacaaagctgagtatgaagaggacagaggcaaaggcttcttcccccagaccattacccaggaatatgaagcaatcaagaaactggaccagtgtaaagatcacgcctacaaagtccacccagataagacaaagttcactcaagtcacagactctcctgtcctggtgcaagcccaggtcaattccaaacagctgagtgatctaaattacaaagccaaacatgaaagtgaaaaattcaagtgtcatatacctccggatgctcctgcctttatccagcacagagtgaacgcctataacctaagtgacaatgtctacaaacaagactgggagaagagcaaagctaagaagtttgacatcaaggtggatgccatcccactgctggcagccaaagccaacagcaagaatgccagtgatgtgatgtacaagaaggactatgagaagagcaaaggcaagatgatcggtgccctcagcatcaatgatgaccccaagatgctgcactccctgaagaccgccaagaaccagagtgatagactctacagagaaaactatgagaagacaaaggccaagagtatgaattactgtgagacccccaagtatcaacttgacacccttctgaagaacttcagtgaggctaaatataaagattcctatgtaaagaatatgttgggccactacgtaggcagctttgaagacccataccatacacactgcatgaaggtttctgctcaaaacagtgataagagttacaaagcagaatatgaagaagataaagggaaatgctatttccctcagacaataacccaagaatatgaatctatcaagaagttggaccagtgtaaagatcacacctacaaagtgcatcctgataagaccaggttcacagcagtcaccgacactcccgtgctgttgcaagcccagctcaacaccaaacagctcagtgatctgaattacaaagcaaagcatgaaggtgagaaattcaagtgcagcgtgccagcagatgcaccggaattcatccagcacagagtcaatgcttataacctgagtgataatgtctacaagcatgactgggagaagagcaaagctaagaagttcgacatcaaggtggatgccatcccactgctggcagccaaagccaacagcaagaatgccagtgatgtgatgtacaagaaggactatgagaagagcaaaggcaagatgatcggtgccctcagcatcaatgatgaccccaagatgctgcactcgctgaagaccgccaagaaccagagcgaccgtgaatatcggaaggactatgaaaagtcaaaaacgatctacacagcccctcttgacatgatccaagtcacccaagctaagaaatctcaggcgattgccagcgacgtggactataaacatgtcttgcacaactatagctaccctcctgacagcatcaatgtggacctggccaagaaggcctacgcattgcagagtgatgtggagtacaaagctgactacaacagttggatgaagggctgtggctgggtgccctttggttccctggagatggaaaaggcaaagcgcgcctcggaaattcttaacgagaaaaaataccgccaacatccagatacgctcaagtttacctcaattgaagatgctcccattacagtgcagtctaaaattaaccaggcccagaggagcgatattgcttacaaagccaagggggaggaaattctgcataagtacaacctgccagcagacctgccgcagttcattcaggctaaggtgaacgcctacaacatcagcgagaatatgtacaaggctgacttgaaagacttaagcaagaagggctatgacctgagaattgatgccatccccatcaaagccgccaaagctgcccgacaggctgcaagtgatattcactataagaaagattatgaaaaggccaaagggaaaatggtcggattccaaagtctccaagacgatcctaaactggttcattacatgaatgtggccaagatacagtcagacagggagtataagaaagactacgaaaagacgaagaccaaatacaatacacctcacgacatgttcgacgttgtggcggctaagaaggcacaggatgtgatcagcaataccaactacaagcactctctccaccactacacctacctgccggacgctatggacctggagctatccaagaacatgatgcacatacagagcgataatgcctacaaggaagattataatacctggatgaagggcattggctggattccgattggtagccttgaccaagagaaagttaaaaaggcaggggatgccctgagtgaaaagaaatacaggcaacatccggacacactcaagttcaccagcatcgtggactccccggtgatggtgcaggcaaagcagaacacgcagcaagccagtgatatcttatacaaagctaaaggagaagacgtgaagcataagtatactctgaatcctgatctcccacagtttctccaggccaagtgcaatgcttacaacataagtgacgtctgctacaagcgggactggcatgacttaatagccaaaggcaacaatgtcctggctgatgctattccgatcaccgcggccaagtcatcaagaaacattgccagtgattataaatacaaagaggcttatgagaaggcaaagggaaagcacgttggcttcagaagcctccaggacgaccccaagttggtccattatatgaatgtggcgaagttgcagtcagaccgagaatacaagaaaaactatgagaacaccaagacaagttaccacacccctggagacatggtcagcatcactgctgcaaggatggcccaggacgtggctaccaacgtcaactacaaacaacccttacatcactatacatacctgcctgatgccttgagtcttgagcacacaaggaatgccaatcaaattcagagtgacaatgtgtacaaagacgagtacaacagcttcttcaagggcattgggtggatccccatcggctcgctggaagtggagaaggccaagaaagcaggcgaggcactgaatgagaggaagtaccgacaacacccagacaccatcaagttcacaagtgtgccagactccatgggcatggttttggctcagcagaacacaaagcagctaagtgatttgaactacaaagtagagggagagaaaatgaagcataaatatacaatggaccctgaattaccacagttcattcaagccaaagttaatgccatcaacatgagtgatgctcattacaaagcagactggaagaaaacgctggccaagggttacgacttgagaccagatgccattcccatcgttgctgccaaaagttcaaggaacatcgctagtgactgcaaatacaaggaggcctatgagaaagccagaggcaagcaaattggctttctcagtcttcaggatgaccctaagctggttcactacatgaatgtggccaaaatacaatcagaccgtgaatataagaagggatatgaggccagcaagacccggtaccacacacccctggatatgttcagtgtgactgctgcaaagaaatctcaggaagttgcgaccaacagcaactacaggcagccctaccacaactacaccctcttgcctgatgccttgaatgtggaacactccaggaatgccatgcaaatccagagtgataatctatacaaatccgacttcacccactggatgaaaggtatcggctgggtccccatagactccttggaggtagagaaggcaaagaaagctggggagattctgagtgagagaaagtatcgccagcaccccgagaagctgaagttcacatattccatggacaccatggaacaggcacttaacaaaagcaacaagctgactatggataagaggctgtacactgagaagtggaacaaagacaagaccagcattcatgtcatgcctgacactccagacatcttgctctccagagtaaaccagatcacaatgagtgataaactctacaaggctggctgggaagaagagaagacgaaaggctatgatctcaagcctgatgccatcgcaataaaggctgcaaaggcctccagagatattgccagtgattacaagtacaagcaagcctatgaacaatccaaagggaagcacattggcttccgcagcctggaagacgaccccaagctggtgcacttcatgcaggtggccaagattcagtcagaccgggaatacaagaagggctatgagaaatccaagacatctttccacaccccggtggacatgttcagtgtggtggcagccaagaagtcccaggaagtggccaccaacgccaactacaggaacatcatccacacctacaacatgcttcctgatgccatgagctttgagttggccaagaacatgatgcagattcaaagtgataatcagtataaggcagactatgccgacttcatgaagggcattggatggctccccctcggctccctggaagctgagaaaaacaagaaagccatggagattatcagtgagaagaagtaccggcaacacccagatactttgaagtactccacactaatggactcaatgaacatggtcttggctcagaataatgcaaaaattatgaataaaaatctctataaacaagcatgggaggctgacaagacaaaaatccacatcatgcctgatatccccgagatcgttttggccaaagcaaatgcaatcaacatgagcgataaactctataagctctctctggaagaatctagaaagaaaggctatgacctcagaacggatgcaattcctatcaaagctgccaaagcatcaagagatattgcaagtgattataaatacaagcacagttatgaaaaggagaaaggaaaaatggttggttttcgcagtctggaggatgatcccaaattagtccattccatgcaagtggctaagatgcagtctgatcgagagtacaagaaaaactatgagaagacgaagaccagctaccatactcctgccgacatgctgagcgtcacagcagccaaggatgcgcaagccaacatcaccaacaccaactacaagcgcctcattcacaagtacatcctcctcccagacgcaatgaacatcgagctgaccaggaacatgaatcacattcagagtgacaatgaatataagcaagactacagggagtggtaccgagggcttggctggagcccagctggctccctagaggtggagaaggccaagaaagcaacggaatatgccagcgatcagaagtaccggcagcatcccagcaccttccagtttaaaaagttgactgactccatggacatggtactggcgaagcagaatgctcacaccatgaataagcatttatacactattgactggaataaagacaaaaccaagattcatgtgatgccggatacaccagatattttgcaagccaagcagaatcaaacactttacagtcagaaatcctatagacttggttgggaagaggctctgaagaaaggctatgatctccctgttgatgcgatttctgtccagctggccaagacatcaagggacattgctagtgactttaaatataaacaaggctaccggaaacaactgggacaccatattggattcctcagtgtgcaagatgacccaaagcttgtgctatcaatgaatgtagccaaaatgcagagcgacagggagtacaagaaggactttgagaagtggaaaaccaaatacaccagccctgtggacatgctgggggtggtgttggccaagaagtgccaggccttggtcagtgatgctgactacaggaactacctacaccagtggacgtgcctacctgaccagaatgacgtcatccaagctaaaaaggtctatgagctacaaagtgagaatatgtataagtctgacctagagtggctgagaggcataggatggagtcccctgggttctttggaagcagaaaagaacaagcgggcttcagaaatcatcagtgagaagaaataccgccaacctccagacagaaataagttcaccagcatccctgacgccatggacatagttctggctaaaacaaatgccaaaaacaggagtgacagactttatagagaagcttgggacaaggacaagactcagatccacatcatgcctgacactcctgacatcattctggctaaagcaaacttaatcaatacaagtgataaactctacaaaatgggttatgaagaactgaagaagaaaggatatgatcttcctgtggacgccattccaatcaaagcagcaaaagcatcccgggagattgccagtgaatacaaatacaaagaaggcttccgaaagcaactcggccaccacattggggctcggaacatcaaggatgaccccaagatgatgtggtccatgcacgtggccaagatccagagtgacagggagtacaagaaggactttgagaagtggaagaccaagtatagcagcccagtggacatgctgggggtggtgctggccaagaagtgccagaccttggtcagcgatgctgactacaggaactacctacaccaatggacatgcctgcctgatcagaatgatgtcatccacgctcggcaggcctatgatctccagagcgataatgtgtacaaggctgatcttcagtggctgaaaggcattggctggataccttctggttccctcgaggatgagaaaaacaaacgagccactcagatcctgagtgaccatgtttaccgtcagcacccaaataaattcaagttttccagccttatggactccatgccaatggtcttggcaaaaaataatgctataaccatgaaccatcacctctatacagaagcttggaataaggataaaaccactgtccacattatgccagatacccctgaagttatactggctaaacaaaacaaagtaaattacagtgagaaattatataagcttggcctggaagaagccaagaggaaaggctatgacatgcggcttgatgccattcctatcaagacagccaaggcctccagggacattgcaagtgacttcaagtacaaggaaggctaccgtaagcagctgggccaccacattggtgcccgtggtatacatgatgaccccaagatgatgtggtccatgcacgtagccaagatccagagtgacagggagtacaagaaggactttgagaagtggaagaccaagtatagcagcccagtggacatgctgggagtggtgctggccaagaagtgccagaccttggtcagcgatgctgactacaggaactacctacatcagtggacatgcctccctgaccagaatgacgtcatccatgctcggcaggcttatgatctccagagcgataatatgtacaagtctgacctccagtggatgagaggcatcggctgggtgcccattggctctttggatgtggaaaaatgcaaacgggccactgaaatcttgagtgacaaaatctaccgtcagcccccagacaagttcaagtttaccagtgtgactgattctctggagcaagtattggccaagaataatgccatcactatgaacaagcgtttgtacacagaagcctgggacaaagacaagacgcaaatccacatcatgccagatacaccagaaatcatgttggcgcgaatgaataaagtcaactacagcgagagtctgtataaacttgccaatgaagaagcaaagaaaaaaggctatgacttacgaagtgatgccatccctattgtggcagccaaggcctccagagacatcgccagtgactacaaatacaaagttggctaccgtaagcagctgggacaccacattggagcccgcaacattgaagatgaccccaagatgatgtggtccatgcacgtggccaagatccagagtgacagggagtacaagaaggactttgagaaatggaagactaagtatagcagcccagtggacatgctgggggtggtattggccaagaagtgccagaccttggtcagcgatgtggactacaggaactacctacaccagtggacatgtctacctgaccagaatgatgtcatccacgctcggcaggcctatgatctccagagtgataatgtgtacaagtcagatctccagtggatgagaggcattggctgggtccccatcgggtctctggatgtggtcaagtgtaagagagctgcagagatcctgagcgacaacatctatcgccagcctccaaacaagtttaagttcaccagtgtgactgattctctggagcaggtgctggccaagagcaacgccctcaacatgaacaagcgcttgtacacagaagcctgggacaaagacaagacccagatccacatcatgcctgatacaccagaaatcatgttggccagacaaaataaaataaactacagtgagagcctgtaccgccaggccatggaagaagctaagaaggaaggctatgacttgagaagtgatgccattcccattgtggctgccaaggcttcccgggacattgctagtgattacaaatacaaagaagcctatcggaagcagttgggtcaccacattggcgctagagcgatacatgatgatcccaagatgatgtggtccctccacattgccaaagtgcagagtgaccgtgagtataagaaagaatttgagaaatacaagacaagatacagcagccctgtggacatgcttggtattgtgttggccaagaaatgccaaaccttggtcagtgatgtggactacaaacacccactgcacgaatggacctgcctgccggaccagaatgatgtcatccaggcccggaaagcatatgacctccagagtgataatctgtacaaggcagacctggaatggatgaaaggcattggctgggttcccattggttccttggaagttgtcaaagccaagagggccacagagatactgagtgacaacatctaccgccagcgtcccgacacactgaaattcaccagtataaccgactcgctggagcaggtgctggcaaagaataatgcaatcaccatgaacaagcgactgtacacggaagcctgggacaatgacaagaaaacgatccatgtcatgccagacacgccagaaatcatgctggccaaactcaacaggataaactacagcgataaactctacaaagtgtctctggaggaggccaggaggcaaggctatgacctgcgcgtggatgctattcctatccgatcagccaaggcatcaagagagatcgctagtgattacaagtacaaggaaggctaccgcaaacagctgggccaccacattggtgctcggaacatcaaggatgaccccaagatgatgtggtccatgcacgtggccaagatccagagtgacagggagtacaagaaggactttgagaagtggaagaccaagtatagcagcccagtggacatgctgggcgtggtgctggccaagaagtgccagatccttgtaagcgacatagactacaagcatcctctccatgagtggacatgcctgcctgaccagaatgatgtcattcaggcacggaaggcctatgatcttcagagcgatgctgtgtacaaggctgatcttgagtggctgagaggcatcggatgggttcccattggctctgtagaggtcgagaaggtgaagagagcaggtgaaatcctgagtgacaggaagtatcgccagcctgcagaccagctgaagttcacatgtattacagacaccccagaaattgtcctggcaaagagtaatgccatcactatgagcaagcatttgtatacagaagcttgggatgctgacaaagcctccatccatgtcatgccagacacccctgaaatcctgctggccaagagcaattctgccaatatcagccataaactatataccaagggatgggatgaatcaaagatgaaggactatgatctgagagaggatgctatttccatcaaaagtgccaaggcctccagggacattgccagtgattacaaatataaggaagcctatgaaaaacaaaaaggccaccacatcggagcccagagtgtggaagatgatcccaggatcctttgcgccatgcacgcagggaagatttacagtgacagggagtacaagaaggaattccagaaatggaagaccaagttcagcagcccagtggacatgctgggggtggtgctggccaagaagtgccagaccttggtcagcgatgtggactacaggaactacctgcacaactggacttgcctgcctgaccagaacgacattattcaagcaaagaaggcctacgaactgcagagtgatgccatctacaaggctgacctggagtggctgcgtggcattggctggatgccagaagggtctcctgaagtcctgagagtcaaaaatgcccaggagatcctctgtgacagtgtctaccggacccccgtggtgaagctcaagtacacaagtattgtggacacacccgaagttgtccttgctaagtcaaatgctgaaaatattagcattccaaaatacagagaagtttgggacaaagataaaacttccatccacataatgccagacacgcctgaaattaatctcgctcgagcaaacgctcttaatgtgagcaataaactctaccgtgaggggtgggatgaagtcaagatgagctgtgatgtccggttggatgctatccccatccaggctgccaaggcctccagggagattgccagtgactataaatacaagcttgaccatgagaagcagaagggacactacgtgggcaccctcacagccagggatgacaacaagatccggtgggccctcatcgctggcaagattcagaatgaaagggagtacaggctgcagtgggccaaatggaagaccaagttccagagccccgtggacatgctttctatcctgcattcgaagaagtgccagacgctggtcagcgacattgactatcgcaattacctacacgagtggacgtgcatgcctgaccaaaacgatgtgatccaggccaagaaagcctacgagctgcagagcgatgctgtctacaaggctgacttggaatggttacgtggaattgggtggatgccgaatgattctgtctctgtcaatcatgccaaacatgctgcagatatcttcagtgagaaaaaatatcgcacaaaaatagaaactctcaacttcactcctgtggatgacagagtggattatgtgacagcaaaacagagcagtgagatccgagatgatattaaatatcgcaaagattggaatgccatcaagtcaaagtatacccttacagaaaccccactgctgcacactgcccaggaggctgcccggatcctggaccagtacctctacaaggaaggctgggagaaacagaaagccacaggctacattctgccacccgatgctgtgccattcgttcatgcccatcattccagcgatgttcaaagtgagctgaaatacaaagctgagcacgttaagcagcgaggccactacgttggcgttcctacaatgagagacgatcccaagctggtttggtttgagcacgcaggccagattcagaacgacaggctctacaaggagagctaccataagtcaaaggccaaaatcaatatccctgctgacatggtgtcggttgtggccgccaaggaagggcagaaccttgtcagtgacatcgattaccgtcaatacctacaccagtggacgtgccaccctgaccaaaatgatgttattcaggcaaaaattgcctatgaccttcagagtgacaatgtctacaaagctgacctggaatggctccgaggtattggctggatccctctggattctgtggaccatgtgagggttacaaagaaccaggaaatggtgaatcagataaaatacaagaaagatgctcttgccaactatcccaactttacaagtgtggaggaccctccagagattgttctagccaagattaactcagtcaatcaaagtgatgtgaaatataaagaaacatttaataaagccaagggcaagtacatattttctccagacacaccatacatctcccactccaaagacatggggaaactctatagtactatactatacaagggagcctgggagggcaccaaggcctatggctacaccctggatgagcgctatattccaattgttggagccaagcatgctgacctggtgaacagtgagcttaaatacaaagaaacctatgagaagcagaaaggtcactacctggctggaaaagaaataagtgagtttcctggtgtggtccactgcctggatttccagcagatgcggagtgcgttgaactacagaagagattatgaagacaccaaagcaaatgtgcatattcccaatgacatgatgaaccacgtgctggcgaagaggtgccagtatatcctcagtgacctggagtaccgacactactttcatcagtggacgtcacttcccgaggagcccaatgttatccgcgcccgaaacgcccaggagatcttaagtgataatgtatataaagatgacttgaattggctgaagggcattggctgctatgtttgggacacaccccagattctccatgccaagaaatcatatgacctccagagtcagctacaatacacagcagcaagtaaagaaaatctgcagaactataacctggtcacagatacgccagtttacgtgactgctcttcagagtggcattaatgccagtgaggtgaaatataaagaaaattaccatcagattaaggacaagtacaccacagtgctagagacggcagactacgacagaaccaagcacctcaagagtctgtacagcagcaacatatacaaagaggcctgggataaggtgaaagccaccagctataacctgcctaccagcaccttgtccctgacacatgccaagaaccagaagcacctggccagccatatcaaataccgagaagaatatgaaaagttcaaagccctttacacattaccaaaaagtgttgacgacgatccaaacacagcgcggtgtctccgagtgggcaaacttaacatcgaccgcctgtacagatcagtgtacgagaagaacaagatgaaaatcaacatcgtgcccgacatggtggagatggtgactgccaaggactctcagaagaaagtcagcgagatcgactaccgcctgcacctccatgagtggatttgccaccctgacttacaagtcaacagtcacgtcagaaaagtgacagaccagatcagcgacattgtatacaaggatgacctcacctggctgaaaggcattggttgctacgtctgggacactcctgaaattctccatgcaaagcatgcttatgacctacgcaatgatatcaagtataaagctcacgtgcagaagacaaggaatgactacaagctggtgactgacacaccggtttacgttcaggcagtcaagagtgggaagcagctgagtgatgctgtctaccactatgactacgtgcacagtgtcagaggcaaagtggccccaactacaaaaacggtggatctggaccgggccctccatgcatacaagcttcagagtgagaatttgtacaagaaaggcctgcgcttcctgcccactgggtacaggctccctgttgatacccctcatttcaatcacaccaaggatacccgctacatgagcagctatttcaaatacaaagaagcctatgaacacatcaaggcaaatgggtacacacttggacccaaggatgtcccgtttgtccatgtccggagagtcaacaacgttactagtgagagactatatcgagaactgtatcacaaactaaaagacaagatacatacaaccccagacacacctgaaatccgccaagtcaagaagacacaagaagctgtcagtgagttgatctacaaatcagacttcttcaagatgcagggccacatgatctccctgccgtatacaccccaagtgttgcactgtcgctacgtgggagacatcacgagtgatattaaatacaaagaggatctgcagatcttgaaggggcttggctgcttcctgtatgacactcctgacatggtccgctcccggcacctaaggaaactctggtcgaactacctgtacacggataatgccaggaagatgagagacaaatacaaagtggtgcttgacaccccagaatacagaaaagtgcaggaactgaagacgcatctgagtgagctggtgtacagagcctcaggcaagaagcagaagtccatcttcacttcagttcctgatacccctgaccttctaagagccaagcgaggacagaagcttcagagtcagtatctctatgttgaacttgctactaaagagagacctcatcaccatgctggaaatcagaccacagctttgcaacacgctaaagacgtgaaggacatggtcagcgagaaaaagtacaagattcaatatgaaaagatgaaagacaagtatacaccagttgcagacacaccaatcctcatcagagccaagagagcttactggaacgccagtgatcttcgctacaaagaaacatttcaaaagactaaagggagatatcacacagtgaaggacgccctggacattgtgtatcatcgcaaagtcacagacgacatcagtaaagtgaaatacaaggaaaactacatgagccagctgggaatctggagctccatccctgatcgccctgaacacttccatcaccgggcagtcaccgatgctgtcagcgatgtaaaatataaagaagatttgacctggcttaaaggcattggttgctatgcctatgatacccctgacttgacgctagctgaacagaacaagactctctacagcaagtataagtataaagaagtatttgaaagaacaaagtcaaacttcaagtatgttgctgactgtccaattaacaggcatttcaagtatgcaactcagttgatgaatgagaaaaaatacagagctgattatgagcagcggaaagataaataccacctggtagtcgatgaacctagacatctgctggctaagaccgcaggcgaccagatcagccagatcaaatacaggaaaaagtatgagaagtcaaaggacaaattcacctcggttgtggacaccccagagcacctgcgcaccacaaaagtcaacaagcaaatcagtgatatactttataaactggaatacaacaaggccagaccaagaggctacaccaccatccatgacacacccatgctgctgcatgtccgcaaagtgaaggatgaagtcagcgatctgaaatataaggaagtttaccaaagaaataaatctaactgcaccatcaagccagatgctgttcatatcaaagcagcgaaagatgcctacaaagtcaacacaaatctggactacaagaaacagtacgaagccaataaagcatactggaagtggacgcccgaccgcccagacttcatccaggcggccaagtcatctctccagcagagtgactttgaatataagctggaccgagagtttctcaagggctgcaagctttctgtcactgacgataaagacatggtgctggccctcaggaattccttaatagagagcgatctgaaatacaaagagaaacacgtaaaggaaagaggaagctgtcatgctgtgcctgacaccccacagatcctcttggcgaagactgtcagcaatctggtgtctgagaacaagtacaaggaccatgtcaagaagcacctggcccaaggctcgtatacgaccctgccagagaccagggatacagttcacgtcaaggcagtgaccaagcacgtcagtgatacaaactacaaaaagaagtttgtcaaggagaaaggcaagtccaactactccatcatgcaagagcctccagaggtgaagcacgccatggaagtggctaagaagcagagtgatgttgcctataaaaaagatgccaaagagaatctgcattacaccacagtggctgaccggccagacatcaagaaggccacccaggcagccaaacaggccagtgaggtggagtacagagccaagcatcgcaaggaaggcagccatgggttaagcatgcttggccgcccagacattgaaatggccaagaaggcagccaagctgagcagccaggttaaataccgcgaaaattttgacaaggagaagggcaaaacacccaaatacaacccgaaagacagccagctctacaaaactatgaaagatgccaacaaccttgcaagcgaggtcaaatataaggctgacctgaagaaactccacaaacctgtgactgacatgaaggagtctctgataatgcaccacgtcctaaatacaagccagctcgccagttcttaccagtacaagaagaactatgagaagagcaaaggccactaccacacaatacctgacaacctggaacagctacaccacagagaagccacagagctgcagagtatcgtgaaatacaaagaaaaatatgaaaaagaacgaggcaagcccatgctggactttgagactccaacatacatcactgccaaagagtctcagcagatgcagagtgggaaagaatataggaaagattatgaagagtccattaaaggcagaaacctgacgggcctggaggtcacgccagcattgttacatgtcagacatgcaaccaaaatagcaagcgagaaagagtataggaaagacctggaagaaagcatccgaggcagaggtctcactgagatggaagatactcctgacatgctgagagccaagaatgccactcagatcctcaatgagaaagaatataagcgagacctggagctggaagtcaaaggaagaggcctgaatgccatggccaacgagactccagattttatgcgggccaggaatgctaccgacattgccagccagattaagtacaagcaatcggcagaaatggaaaaggccaattttacttctgttgttgataccccagaaattatccatgctcagcaagtgaagaacctttccagccagaaaaagtacaaggaagatgcagagaagtccatgtcatattatgagactgtcttggacacgccagagatgcaaagagtccgcgagaaccagaagaacttcagcctgcttcaataccagtgtgaccttaaaaacagtaaagggaaaattacagttgttcaagacacgccagaaatactgcgtgttaaagaaaaccaaaagaatttcagctcggttttatataaagaggatgtatccccggggacggcaattggaaagacgcctgagatgctcagagtgaagcaaacgcaggaccacattagctcggtcaagtataaagaagcaatcggacaaggaactccgatccctgacctgcccgaagtgaaacgcgtcaaggagacccagaagcacattagctcggttatgtacaaagaaaacccgggaacaggcatcccgaccactgtcactccagagattgagagagtcaaacgcaaccaagagaactttagctcggtgttgtataaagagaaccttgggaaagggattccgatccccatcactccagagatggagcgagtcaaacacaatcaagaaaactttagttcggtgctatacaaagagaacatgggcaagggaacccctttacctgtcactccagagatggagagagtcaaacacaatcaagaaaatattagctcggttttgtacaaagaaaatgtggggaaagccaccccaacccctgtcactccagagatgcagagagtcaaacgcaatcaagaaaacattagctcggtgctatacaaagagaacatggggaaagcaacccccacacccttcactcctgagatggaaagagtcaaacgcaatcaagaaaactttagctcggtattgtacaaagagaacatgagaaaagcaacaccaacgcctgtcactccagacatggagagagccaaacgcaaccaagaaaacattagctcggttctttactccgatagcttccggaaacaaatacaagggaaagctgcctatgtgctagatacaccagagatgaggcgggttagggaaacccaacggcacatctcaacagtgaaatatcatgaagactttgagaaacacaaaggctgctttacaccagtggtgacagaccctatcactgaacgagtaaagaaaaacacacaggacttcagtgacattaactaccgaggtattcagagaaaagtggtggaaatggaacaaaagcggaatgaccaggatcaagataccattacaggtctgcgtgtctggcgtactaaccctggttcagtttttgactatgatccggcagaagacaacattcaatcccgaagtctgcacatgattaatgtccaagctcaacgccggagccgggaccagtcaagatctgccagtgcactgagtatcagtgggggcgaggagaaatctgagcactccgaagctgcggaccagcgcctttccacatacagtgacggaggtgccttcttctctgcaacttcaacagcttacaaacatgtgaaaaccactcagctcccacagcaacggtcatcttcagttgccacccagcagacaacactgtcctctatcccatcacacccgtctactgccgggaaaatcttccgtgctatatatgactatatagctgcagatgcggatgaagtgtcctttaaggatggagatgctatagtgaatgctcaggcgattgatgaaggctggatgtatggcactgtgcagagaactggcaggaccggtatgctccctgccaactatgtggaagctatttaagcacttcaagacctccatcagtctgcagtatctgcaactctgcaggcaacatttcagtggagacttcagtacaccagggctttcaagctctctcatgttttcacctgtagcaatatcatttcatgtgttacaatctcttctatagaaaccatggttactctccatgtataaacttaccagcaaatgacttacaaatattttacccaacatcaattcatctgctcagttcttaaactagatttacagcttaatttttttcccctggatttatacatggaactgtagacagtaaacatgtaaaaatttactttccaaataagcttttacattatgaactcttcagttttaaagtaaattcaaattcacaatagaattgttaaatgcttctgtagtgttatgtaaccaaaccagtccttcccaattataaaaacatttgacatcattctgaacatccaaactttgtaaaagaaaacaagagaagccctttcccttgtttactatgtgttaatgcttgcgtttcatttctgtaagaatgaacagtcaatatcaagtgttgagaaagtagaaactaataaaatctatagtactgaaataaactgttcatgggcaacactttaatagtctgagtttaaaagttacctaaatttgaagttggaactgtgagttggtgctctttgtgtgattcccagcatccacatggcagctcacaaccatttgtaacttgagtcccaaagatcacacacacatggtacacatgaatacacaggcaaaacacctatatgcataaacaataaaatgaaacccacccctcccattaag

SEQ ID NO: 378 - DNA, 1837 bp, Mus musculus
gagttcggccacgtccctggccacgtcgcgcccgctcccgccatctttcgccgcttcctctctccggggctgctgtcgccgcgtcccgagtcgctgcctagctccggtgccgctgtgccgcgccgaccgccgccgccatgaacatcttccggctgactggggacctgtcccacctggcggccatcgtcatcctactgctgaagatctggaagacgcgctcctgtgctgggatctctgggaagagtcagctcctgttcgcactggtcttcacgactcgctacctggaccttttcacttccttcatttccttatacaacacgtctatgaagcttatctacattgcctgctcctatgccacggtgtacctgatctacatgaaatttaaggccacctatgatggaaatcacgataccttccgagtggagttcctggtggttcctgtaggaggcctctcatttctagtcaatcatgacttctctcctcttgagatcttatggaccttctccatctacctggagtccgtggccatccttccacagctctttatgatcagcaagactggcgaggctgagaccatcaccacccactacctcttcttcctgggcctctaccgcgctctgtacctggtcaactggatctggcgcttctacttcgagggcttctttgatctcattgctgtggtggctggtgtcgtccagaccattctctactgcgacttcttctacttgtacattacaaaagtactcaaagggaagaagctcagcctgccagcctaagtgccaaagaccagcagcagcctctgcccttcggggtgctcggacagggtctcaccatggcgaaggcgaaggcgaaggctcgggatgctcagtgggcagaagcagaggcttctgcggtagccactcactggtggctcttcgaggatgcagaggaagagaccaggaggcttctgtctactgcatcctgccttatcttttttattactatgtacaaagatttttttacacaaagaaacttaatgctgtgttaataaattcagtatgtagatgaattgggacagtttccaaaagtgacgattttgtgcacaataagtacgagccttttttattttttgagaatttgttgaggtggtcaattctttgtgtctacaatgaaattatactccttgacacttggtagattatccaaacatctgtcaaatttccatgctatttattttctttcttttctttctttctttttttttttttttttttttttgccaaaaagataagttgtgtttgtttgaaatctgagacattgtgttccattggtgtttctgtccaaaaaagtcctcgttgtcctggaaacccttcctcaaatgtcacactacatgtcaggttcgggaggatgactagaaagtcctaaggtttcattaccaaaacttgaaggttcccagcagaaaactcagctgatgctcaccaaacgctcacccttcccccgttgaggtgtggcagcttgaggttatccgagggtgcttagagctgccacacccagagggtttgagccacctgccctctgactatggagagggctgggggtgatggctgttttggatagaggactcagctcctctgaggaatggaacacaaatagccacctgtcactgtcagtccgaaggatcactacaaccatgttagactcaaatgtttttctcatagcacttttggtgataaaatgattgacaatctttttaattggcaacaccagttatcattccttacattctttttagtattttttttaaactgggctcttgcatgacctatattgtgttaacatcctaaataaacattttatt

SEQ ID NO: 379 - DNA, 750 bp, Mus musculus
ggtgttttaaagtggaggaggactgtggtggctgtgtccctggtggaacttaaaactctgtttccactcgtggaagcattgaatttccaggatttctaggatgttggctcatgcagtgctgtgggcgaaatgacaatttatgcggattttggcatgtactatccagtgagacagtaattttatggaaattacagtgccacgtagtaggtagcctgtggttaatactggactcgtctgccttggatatcagtgatgtgttggaaaacttaaccaatatgcaacatgggctatgaatgtgacatggatgctgttaaccaagggacagaaaccacaagcaaaatgccaaaagcgatcttaattagaaatcttaatttggtttttaagatattgttttatcattatttattttgtggtaatatagtaaggttttttttcttttctttttttttttttttaggaaacaactttcgtaactgggataaattatagtttgtgttggttagaaaagtggcttctcaacggtgtaaatgaggcgacaaagtgggtgtaaatagtttggtaaggcctccaagagtgtttatacggtggacacacctacattcagaagcataactcggcgtgcgtggttctgccgcctcctcccttattttgggtatgggggtaatttcctagtgcaaatatcagagcaagcagctgtcgagctggtagaatttttgcgagagaatgagatgttctatatattaacttttt

SEQ ID NO: 380 - DNA, 2107 bp, Mus musculus
ggtcaatgaaaacaagccgggcctctgagggccgcagcagcgcggccggcgccgggccaggaggatgcgcggcgccgggctctgaagcatggagggggttctgtacaagtggaccaactatctcacaggttggcagcctcgatggtttgttctggataatggaatcctgtcctactatgactcacaggatgatgtctgcaaagggagcaaagggagtataaagatggcggtctgtgagattaaagtccatcccgcagacaacacaagaatggagttaatcattccaggagagcagcatttctacatgaaggcagtaaatgccgccgagagacagaggtggctggttgcccttgggagctccaaagcgtgtttgaccgacacgaggactgcaaaagagaaagaaataagtgagaccagtgaatctctgaaaaccaaaatgtctgaacttcgcctctactgtgacctcctgatgcagcaggttcatacgatccaggaattcgtccaccgtgatgagaggcatccctctcccagtgtggagaacatgaatgaagcctcctccttgctcagtgccacctgtaacacattcatcacaaccctggaggagtgtgtgaagatcgccaacgccaagtttaaacctgagatgtttcaactgcctcatccggatcccctggtctctcccgtgtcgccttctcctgttcagatgatgaagcgttcagccagccaccctggttcctgcagttccgagaggagcagctgctccatcaaagaaccagcatctgccctccaccgacttcctcagcgacgccgcagaacctactcggacacagactcttgtaatgatgttccccctgaagacccagagagacctcttcactgttcaggaaacacacttaatggagatttggcatcagcaaccattccggaagaaagcagactcatggccaagacacaatctgaagaacctcttctgcccttctcctgaggaaacagacatgcccagcttcctcctgaggaaacagacatgcccagcttcctcctgaggaaacagacatgcccagcttcctcctgaggaaacagacatgcccagcttcctctgagtgtcgctatgcaaaagctgctgtaattaaactcggtctgggctagctttgccctctccttaggatttctctgcactttatagaatattgtaaacaaacaacccacatacttttgaagtgtattttatctttctatagtttacttgcaagagtattttcctaataacttcacagtatgaatgtgcatcttttttttttttttaaacaaatgatggtgtaacattttgacatccataaggacaaatgtagatatttttctaaaaaactgtgagggactgacagcttggtcagtgtgtattgtagtatataaacatgaaatctcgccagatttatttgacagaaatgtgagagatgtaacttgtgccatggaccaaaaggtcacttcaccccagcttaaaattaattaccatagcagcttgatggtgattatatcatattcctttaagcaaaaaggaaacgcttaatattctaaaggtctttagcccaaataccatgacatattgagcatttttttttaaaaagcagactccgctgtccttcatatgtgaagttgacatctactgatttgtcaataccaaacatcagattacagtatttaatttttatttatttattttcttattgcatcagaagatggttatgtcctaacttttatggcctccccaatttaagatgtatatgcatagttgttattacgttgttctaagatacatgaggcaagtgtcccagtgatcttgttcccttacacgagagaagtaaacagctttcaatgggaatggagttcagtgcttttcagaaaataggcagcaagctgctgttgtaaggtatgatttgcagctctttggcatatctagagacatttttaatttatgaatatttatacaaaaagcaattctgtcaagatgactgttctatatcacttgagaatggcattatttaattaaagaacaatttgcaaaaaaaaaaaaaaaaaaaaaaaaaaaaaaaaaaaaaaaaaaaaaaaaaaaaaa

SEQ ID NO: 381 - DNA, 1722 bp, Mus musculus
cggcgggtttgccgtcagaacgcaggtgttgtgaaaaccaccgctaattcaaagcaaaaatgggaaaggaaaagactcacatcaacatcgtcgtaatcggacacgtagattccggcaagtccaccacaaccggccacctgatctacaaatgtggcggaatcgacaagcgaaccatcgaaaagtttgagaaggaggctgctgagatgggaaagggctccttcaagtacgcctgggtcttagacaaactgaaagctgagcgtgagcgtggtatcactattgacatctccctgtggaaattcgagaccagcaaatactatgtgaccatcattgatgccccaggacacagagacttcatcaaaaacatgattacaggcacatcccaggctgactgtgctgtcctgattgttgctgctggtgttggtgaatttgaagctggtatctccaagaacgggcagacccgcgagcatgctcttctggcttacaccctgggtgtgaaacagctgattgttggtgtcaacaaaatggattccaccgagccaccatacagtcagaagagatacgaggaaatcgttaaggaagtcagcacctacattaagaaaattggctacaaccctgacacagtagcatttgtgccaatttctggttggaatggagacaacatgctggagccaagtgctaatatgccttggttcaagggatggaaagtcacgcgcaaagatgggcatgccagtggcaccacgctgctggaagctttggattgtatcctaccaccaactcgtccaactgacaagcccctgcgactgcccctccaggatgtctataaaattggaggcattggcactgtccctgtgggccgagtggagactggtgttctcaagcctggcatggtggttacctttgctccagtcaatgtaacaactgaagtcaagtctgttgaaatgcatcatgaagctttgagtgaagctcttcctggggacaatgtgggcttcaatgtaaagaacgtgtcggtcaaagatgttagacgaggcaatgttgctggtgacagcaaaaacgacccaccaatggaagcagctggcttcactgctcaggtgattatcctgaaccatccaggccaaatcagtgctggctacgctcctgttctggattgtcacacagcccacatagcatgcaagtttgctgagcttaaagaaaagatcgatcgtcgttctggtaagaagctggaagatggccccaagttcctgaagtctggcgatgctgccattgttgatatggtccctggcaagcccatgtgtgttgagagcttctctgactaccctccacttggtcgctttgctgttcgcgacatgaggcagacagttgctgtgggtgtcatcaaagctgtggacaagaaggctgctggagctggcaaagtcaccaagtctgcccagaaagctcagaaggctaaatgaatattacccctaacacctgccaccccagtcttaatcagtggtggaagaacggtctcagaactgtttgtctcaattggccatttaagtttaatagtaaaacactggttaatgataacaatgcatcgtaaaaccttcagaaggaaagaatgttgtggaccattttttttgtgtgtggcagttttaagttattagttttcaaaatcagtactttttaatggaaacaacttgaccaaaatctgtcacagattttgagaccattaaacaaggtttaatg

SEQ ID NO: 382 - DNA, 5271 bp, Mus musculus
tggaaatacaaggttcattatttaataatgtaaaatgaagatctgatcagcagaggtgctgttaccagatttgccctctgggtataaattaaaaatgactgaagttcaagcaatggtagaattctccgtggagctaaacaagttctacaacgtggatttattccaaagaggtttttaccaaatacgcgcatcgatgaaaataccagcaagaattccccaccgagtagaagccagtttgttacacgcaacaggcatgacattagcctttccagcttccgttcatgatgctctggtttgcagcaaaacatttcagatcctatataaaaatgaagaagttgttttaaatgatgtcatgatcttcaaagttaaaatgctgttggatgaaagaaagattgaagaaacccttgaagaaatcagttttttgttatcgttgggtctacatttcacagatggagactattcggcagatgatctgaatgccttgcaactaataagcagtcggacattgaagctgcactatagcatctgtagaggccttcatcaccatgcgaatgtcatgtttgattacttccacctgtctgtggtgtccgttacagttcacgcgtcattggttgcactacaccagccgctaataagctttcctcgccctgtgaagaccacttggttaaatagaaatgcgccagcacagagcaaagactcggcgattccgactctggaaagtgtagtctttggtattaactacacaaaacagttatcaccagatggctgtagcttcctcattgcagagtccttcctgcaccatgcctatcattttcattatacactttgtgctactttgctgctagccttcaagggattgcacagctacttcattacggtaacagaagagattccctcttgtcagaaactagacctggaggaaatggatgtagaagctcgtcttactgaactgtgtgaagaagttaagaaagtagaaaaccctgatgaactggcagaactcatcaacatgaaccttgcacagctctgctcacttctcatggctttatggggacagtttttggaagctataacactgcatgaagatttaagagtgctgttagcacaggaacaccatactttgagggttcgcagattttcggaggcgttcttttgttttgaacatccaagagaagctgccattgcataccaagaactccatgctcagagtcatctacagatgtgcaccgctatcaaaaatacttccttctgcagttctcttccacccctacctattgaatgtagtgaattagatggagatctcaattcattacctataatctttgaagataggtatttagattcagttattgaagacttagatgcgccctggatgggaattcaaagtcttcagatatcagaggccagtaaaacggataaacatgagactgaagaaagctctgtagtaggactttctagcccagagttgaaggtcagacctgctgttgcctccagtaattgctatacagaaggtgaaaagcagctaacaaaatctctaaaaggaaagaatgaagaatcaaataaatccaaggttaaggtcactaagctcatgaaaacaatgaaaccagaaaacacaaaaaagttaataaaacagaactctaaagattctgtggttttagtaagctacaaatgtttgaaaactacagcctcaagtgatttcactaaatgcttggaaggcagtccttcacatagtcagaaggaaggtctggatcccacactgtgtgcaggtaattttgacccaaagacctacaccagacagccaagtcaaaaggaagctagctctttgtcagctaacacagacagaagtgaacataagtctccagatactgaaaatatgcaaccagaccagttcgagctcttgaactctggcagcctaaatctttgtgcaaatttgtccatttcaggtaaacttgctatatcccaagacaatagtgatattccagatacggaacacaatctggcatctacaagttcatcaaatgattgccatgactatcagacaaccccatcttcgggagttagaacacttgaagtcaagtccagcagtaaagagtctttcaatggagagaaaattactgttaaaataggaccttggacagagcttcaagaagctgaactatttgtggataatttactgccagattttgaggccttagactctaattataaacccaagtctatagatataccacttgaaagggatgctttacaggagacaaaatgtcattctactgaagaatcattaactaaattcagaagtaatctacctgctccttctacaaaagaatatcatgttgcagtaagtagtgacacgattaaattaccagacactaatgccacgtatgcctcctctagattctcagattcaggtgttgaaagtgaaccaagttcttttgcaacacatccaaatccggagatagcctttgagactctccaagggccaggtccttgcaataatgaaaggttatttcctcagcttttgatgaagcctgatcacaatgtaaaattttcattaggaagtcattgcactgagagcacaagtgctttaagtgaaatacagtcatctttgacatccataaactccctgccttcagatgatgaactgtcacccgatgacaactgtaagaagtctgctgtgcctgactgtcatctaagtgacagtaaaactgtattcaatctaggaacaatggatctgccaaaatgcgacgatactaaaaagtcaagtattattttgcaacaacaaagtgttgttttttcaggacatttggacaatgatacgttagcaatgcattccttagatttaagcactgaggaccctttacggctcgttttcttggatgaagatgcttctagtggtgtgagaagtagctggggctccaaacctcatttggatgctccctttacaggcccccagagtcagggtacatctagtaacaactccacggaatcagtgccaacactaaattcaaaactgatttgcttaggttctccctgtgtggtctcaggttctgtttgcactgatgcagggctcagtgcagatagaactgtggaaggaaagagcggtgagccattaaatcacaaacaagtgtgttcagcagcccctgttgtggaaagtgaccctctttccagcagtactgatgtggtaaaacaagggctggtggaaaattattttggatctcagagcactacagatgtttctgatgcatgtgctattacctgccacagtccagttagctctcaggaaacctgcgacaaagggattagtgatctgcagcaggaacagggcaaagaggaggaagaggaggatcaagaaatggttcaaaatgggtatcatgaagaaacagatttttcagctacggatggaacagtaagtgttcactatataagtggaaacgagttaggagaaggaagacatgaacagtctgaaaaactaagcagcaactatctgagtgctggtgtgactgttcctgctgtttgtacatctggttgtttgtccttcccatctgctctgcgagagtctccttgtgttaaatattcttctagaagtaaagttgatgccattacaaagcaaccaagcagcatttcttacaacttcagttcttcaacctcctggtatgaaaattcaccaaaacctcaaatacacgccttccttcaggcaaaagaagagctgaagcaactcagactgcctggtttcatgtacagtgatgttcctctgctggcatcctcagcaccgtacttcagcatggacgaagaggacggctctgaggacggcgtgcatctcattgtctgtgtccatggtctagatggaaacagtgcagatctccgactagtaaaaacatacattgaacttggactgcctgggggaagagttgattttcttatgtctgagagaaaccagaatgatacttttgctgattttgactgcatgactgatcgccttttggatgagatcatacagtatattcagatatatagtttaacagtctcaaaaataagctttattggacattcgttaggcaatttaataatccgttcagtgcttacaaggccaaggtttaaatattacctcagcaaacttcatacctttctctctctttctggacctcatcttggtacactctacaacagcagtgctctcgtcaatacaggtctctggtttatgcagaaatggaaaaaatcaggctctcttttacagttgacatgtcgagatcattcagaccctcgccaaacatttttatataagcttagtaataaagcgggacttcattatttcaagaatgttgtgctggttggatccctgcaggatcgctatgttccttaccattctgcccgcattgaaatgtgtaaaacagctttaaaggacaagcagtcaggacaaatctattccgaaatgatccacaacttgcttcgcccagttctgcaaagcaaaggctgtaatttggttcggtacaatgtcattaatgcgttgcccaacacggctgattcgctcatcggaagagctgcacacatagctgttcttgattctgagatatttttagagaagtttttcctggttgccgccctcaaatattttcagtaggaccgaagcatcattagagacttaccaattacctcattcagcagtgatttaaataatgtattatagttgtgtagatgctaagtttatgacatatttatacctttttatatggaagataatttatatcatccatgtgtagagccttttaaacatcaactttactttctaggtaatgtggctgtgcaatagttttttaattttatctttttacttttctatttttcatatattttgctacctaagtatttcagtgaaccttgtgcccatgtgtatgtctgatcttttattattggcttccacgatccttattcagactatatcacattaagagctgttattgctagcatagtattttaaattctctaatttggggcttttggtggacaataaattttacctttaacactttattctgtttaaactggaagtaaaataatggctgctaaaatgtatttttgaaatcaacttctttaatcctaagatattaaatttacatttgatcaaaccaggtggttcatacatgccaatgttttaaaggttttctataaaatcatattgttgctgttaaatgtgtcatgcttattaaaatatatttttactggtaatttcaaaaaaaaaaaaaaaaaaaaaaaaaaaaaaaaaaaaaaaaaaaaaaa

SEQ ID NO: 383 - DNA, 2146 bp, Mus musculus
cggacgcgtgggcggacacgtgggcggacgcgtgggcggaggcagctgccgggcattcgtgtggtctcgtcgtcagcgcagctgggcctacacacaagcaaccatgtctaagggacctgcagttggcattgatctcggcaccacctactcctgtgtgggtgtcttccagcatggaaaggtggaaattattgccaatgaccagggtaaccgcaccacaccaagctatgttgctttcacggacacagagagattaattggggatgcggccaagaatcaggttgcaatgaaccccaccaacacagtttttgatgccaaacgtctgatcgggcgtaggtttgatgatgctgttgttcagtctgatatgaagcactggcccttcatggtggtgaatgatgcaggcaggcccaaggtccaagtggaatacaaaggggagacaaaaagtttctacccagaggaagtgtcctccatggttctgacaaagatgaaggaaattgcagaagcgtacctcggaaagactgttaccaacgctgtggtcacagtgcccgcttacttcaatgactctcagcgacaggcaacaaaagatgctggaactattgctggcctcaatgtacttcgaatcatcaatgaaccaactgctgctgctattgcttatggcttagataagaaggtcggagctgaaaggaatgtgctcatttttgacttgggaggtggcacttttgatgtgtcaatcctcactattgaggatggaatttttgaggtcaaatcaacagctggagacacccacttaggtggagaagattttgacaaccgaatggtcaatcatttcattgctgagttcaagcgaaagcacaagaaagacatcagtgagaacaagagagctgtccgccgtctccgcacggcctgcgagcgggccaagcgcaccctctcctccagcacccaggccagtattgagattgattctctctatgagggaattgacttctatacctccattacccgggctcgatttgaggagttgaatgctgacctgttccgtggcacactggaccctgtagagaaggcccttcgagatgccaagctggacaagtcacagatccatgatattgtcttggtgggtggttctaccagaatccccaagattcagaaacttctgcaagacttcttcaatggaaaagagctgaacaagagcattaaccccgatgaagctgttgcctatggtgcagctgtccaggcagccattctatctggagacaagtctgagaacgttcaggatttgctgctcttggatgtcactcctctttcccttggtattgaaactgctggcggagtcatgactgtcctcatcaagcgcaataccaccatccccaccaagcagacacagactttcaccacctactctgacaaccagcctggtgtactcattcaggtgtatgaaggtgaaagggccatgaccaaggacaacaacctgcttggaaagttcgagctcacaggcatccctccagcaccccgtggggtccctcagattgaggttacttttgacatcgatgccaatggcatcctcaatgtttctgctgtagataagagcacaggaaaggagaacaagatcaccatcaccaatgacaagggccgcttgagtaaggaagatattgagcgcatggtccaagaagctgagaagtacaaggctgaggatgagaagcagagagataaggtttcctccaagaactcactggagtcctatgccttcaacatgaaagcaactgtggaagatgagaaacttcaaggcaagatcaatgatgaggacaaacagaagattcttgacaagtgcaatgaaatcatcagctggctggataagaaccagactgcagagaaggaagaatttgagcatcagcagaaagaactggagaaagtctgcaaccctatcattaccaagctgtaccagagtgcaggtggcatgcctgggggaatgcctggtggcttcccaggtggaggagctcccccatctggtggtgcttcttcaggccccaccattgaagaggtggattaagtcagtccaagaagaaggtgtagctttgttccacagggacccaaaacaagtaacatggaataataaaactatttaaattggcaccaaaaaaaaaaaaaaaaa

SEQ ID NO: 384 - DNA, 1320 bp, Mus musculus
cttcctctcccggagacctcggttttgcacaagccggcctcgaaatcagagcctttgagagcgacccgggagcctgtgctcggcggccgcgggcttggccagtggcgtgcgctcggccgcccccagccccacgcgcgccgggcgggcgccatggaggagggctccagctcgccggtgtcccccgtggacagtctgggcaccagtgaggaagagctggagaggcagcccaagcgcttcggccggaagcggcgctacagcaagaaatcgagcgaagatggcagcccgaccccgggtaagcgcggcaagaagggcagcccgagcgcgcagtctttcgaggagctgcagagccagcgcatcctggccaacgtgcgcgagcgccagcgcacccagtcgctcaacgaggccttcgccgcgctgcgcaagatcatccccacgctcccctctgacaagctcagcaagatccagacgctcaagctggccgccaggtacatagacttcctctaccaggttctccagagcgacgagatggacaataagatgaccagctgcagctacgtggctcacgagcgtctcagctacgccttctccgtgtggcgcatggagggcgcgtggtccatgtccgcctcccactagcgccgcgccgtgccatccacctccggagccgcaagccaggacccacctgcacatctcaggcgcatgcggaactggatgcggccacggctgtgactttcggcacctggacaaccttgtggttcctcatgaccccagtgcccaagtgtttggcaggggacagagacccaggttcacatcctcctcagatacccaggggatgggcatcagccttcctgccagtgacttctgtgccctcatctcctcactgttggattttcctcctgggttttagtttgggggaatctttctggaaagttctagcttcaggaatgcatttgtaaggatatatattggattgtatttccctctaagtgccttcttttaatgtatatttttaaataaaacagaaatgcattcttgtagaacctgtttaaactggaccaaggctctcagaacaagaacccaagatccctcccgccccagacctcccgtgactgtttcgaggaagcctggaattcttgcccgcatactcctgttctttacgtctccatggcctgctcagctagccgtgttttctattccctgtccagtgtatatgttgcttatttgtttatttattgagatattttaccagctaagtgactgccacgcggttgtgtataacgctccacacccaggaacaataaagaggcctgcacagcaaaaaaa

SEQ ID NO: 385 - DNA, 3565 bp, Mus musculus
gcggcgccatcttaagccctcgctcggtggcggccgcgtcagctcgtgtcctgtgaagcccgcggcccggggaggcggagacggagcacggtgggcgccgagccgtcagtgcaggaggccgaggccgagcgggcggccgcgagtgagcagcgcgcgggcctgagggtacctgaagctcagcgcacagctgctgtgacaccgctgcgtggacaatggctactcaagctgacctgatggagttggacatggccatggagccggacagaaaagctgctgtcagccactggcagcagcagtcttacttggattctggaatccattctggtgccaccaccacagctccttccctgagtggcaagggcaaccctgaggaagaagatgttgacacctcccaagtcctttatgaatgggagcaaggcttttcccagtccttcacgcaagagcaagtagctgatattgacgggcagtatgcaatgactagggctcagagggtccgagctgccatgttccctgagacgctagatgagggcatgcagatcccatccacgcagtttgacgctgctcatcccactaatgtccagcgcttggctgaaccatcacagatgttgaaacatgcagttgtcaatttgattaactatcaggatgacgcggaacttgccacacgtgcaattcctgagctgacaaaactgctaaacgatgaggaccaggtggtagttaataaagctgctgttatggtccatcagctttccaaaaaggaagcttccagacatgccatcatgcgctcccctcagatggtgtctgccattgtacgcaccatgcagaatacaaatgatgtagagacagctcgttgtactgctgggactctgcacaacctttctcaccaccgcgagggcttgctggccatctttaagtctggtggcatcccagcgctggtgaaaatgcttgggtcaccagtggattctgtactgttctacgccatcacgacactgcataatctcctgctccatcaggaaggagctaaaatggcagtgcgcctagctggtggactgcagaaaatggttgctttgctcaacaaaacaaacgtgaaattcttggctattacaacagactgccttcagatcttagcttatggcaatcaagagagcaagctcatcattctggccagtggtggaccccaagccttagtaaacataatgaggacctacacttatgagaagcttctgtggaccacaagcagagtgctgaaggtgctgtctgtctgctctagcaacaagccggccattgtagaagctggtgggatgcaggcactggggcttcatctgacagacccaagtcagcgacttgttcaaaactgtctttggactctcagaaacctttcagatgcagcgactaagcaggaagggatggaaggcctccttgggactctagtgcagcttctgggttccgatgatataaatgtggtcacctgtgcagctggaattctctctaacctcacttgcaataattacaaaaacaagatgatggtgtgccaagtgggtggcatagaggctcttgtacgcaccgtccttcgtgctggtgacagggaagacatcactgagcctgccatctgtgctcttcgtcatctgaccagccggcatcaggaagccgagatggcccagaatgccgttcgccttcattatggactgcctgttgtggttaaactcctgcacccaccatcccactggcctctgataaaggcaactgttggattgattcgaaaccttgccctttgcccagcaaatcatgcgcctttgcgggaacagggtgctattccacgactagttcagctgcttgtacgagcacatcaggacacccaacggcgcacctccatgggtggaacgcagcagcagtttgtggagggcgtgcgcatggaggagatagtagaagggtgtactggagctctccacatccttgctcgggacgttcacaaccggattgtaatccgaggactcaataccattccattgtttgtgcagttgctttattctcccattgaaaatatccaaagagtagctgcaggggtcctctgtgaacttgctcaggacaaggaggctgcagaggccattgaagctgagggagccacagctcccctgacagagttactccactccaggaatgaaggcgtggcaacatacgcagctgctgtcctattccgaatgtctgaggacaagccacaggattacaagaagcggctttcagtcgagctgaccagttccctcttcaggacagagccaatggcttggaatgagactgcagatcttggactggacattggtgcccagggagaagcccttggatatcgccaggatgatcccagctaccgttcttttcactctggtggatacggccaggatgccttggggatggaccctatgatggagcatgagatgggtggccaccaccctggtgctgactatccagttgatgggctgcctgatctgggacacgcccaggacctcatggatgggctgcccccaggtgatagcaatcagctggcctggtttgatactgacctgtaaatcgtcctttaggtaagaaagcttataaaagccagtgtgggtgaatactttactctgcctgcagaactccagaaagacttggtagggtgggaatggttttaggcctgtttgtaaatctgccaccaaacagatacataccttggaaggagatgttcatgtgtggaagtttctcacgttgatgtttttgccacagcttttgcagcgttatactcagatgagtaacatttgctgttttcaacattaatagcagcctttctctctatacagctgtagtgtctgaacgtgcattgtgattggcctgtagagttgctgagagggctcgaggggtgggctggtatctcagaaagtgcctgacacactaaccaagctgagtttcctatgggaacagtcgaagtacgctttttgttctggtcctttttggtcgaggagtaacaatacaaatggatttggggagtgactcacgcagtgaagaatgcacacgaatggatcacaagatggcgttatcaaaccctagccttgcttgttctttgttttaatatctgtagtggtgctgactttgcttgcttttattttttgcagtaactgttagtttttaagtagtgttatgttctagtgaacctgctacagcaatttctgatttctaagaaccgagtaatggtgtagaacactaattcataatcacgctaattgtaatctggagacgtgtaacattgtgtagccttttgtataaatagacagatagaaatggtccgattagtttcctttttaatatgcttaaaataagcaggtggatctatttcatgtttttgaacaaaaactttatcggggatacgtgcggtagggtaaatcagtaagaggtgttatttgagccttgttttggacagtataccagttgccttttatcccaaagttgttgtaacctgctgtgatacaatgcttcaacagatgcggttatagaaatggttcagaattaaacttttaattcattcaaaaaaaaaaaaaaaaaa

SEQ ID NO: 386 - DNA, 4013 bp, Mus musculus
ggaagtcacatgtgcgaaaggatagttggggtttcccctgtgtttggaccctcctgttccccgaagcgttctgaagcattccggggccttgcgtgaacttctagttcttccgccttagccgcggagacttccgcttcctggattccaccctcagtctgacaagattgggatccagttaccagttatccttgttgaggaaccaaatcagagtttctacgaagttgcctatggctgctggagacaggggatcctgttagagagtaaggagcccctggcaaaagcattctgctttttgccttcatgaatgacttcttggacctcatgttgataacctgtctgattatgagtcaagaggaaatgtcaagaaacaaaattcagtgttctcctcactaagtaaaagacatagcctttgaagaataccttgtggcaattgtccacgtaggaatgcagtgcttcttcaggtactcccagtgccccacagatggctaccatcagtctatctcccaagtttgctatgtcctctctggactctgcagataaccaggaatcagaattttctcttccatcaaaatatgattcttgtcagcagagtttgggtttgtttgcttgccatgctccagagcctgatacaccagctcgtgtttgttctcaggagtctgtgacatttcaagatattgctgtggactttactgagaaagagtggcccctgctagattcttcccagagaaaactgtacaaagatgtaatgctggagaattatagcaatctaagttcactgggttatcaggttggcaaaccccgcctcatctcacacctagagcaagaagaggatctgagaatggaggagagaggaattcaacagggtccttctccagattggggaactacatctaaagtcaaatggtctattcttctggaagatatttttgggaaggaagcatctgatgatgtaagattggaaacatctcatcttttggagacatctcctgaattcagccacttgtgtgaagtctttgatattggccctcaccttgctcagccagtaggaaggcccacaggcaagaggccctatcaccaccacagctgtggagtcaagaacaggattcacctgactcagcacatgagcatgaatgatgggagaaaatggcataagtgtcaccagtgccagaaagccttcaccaccagtgcttctcttacaaggcaccatagaattcacactggggagaagccttacgagtgcagcagctgtggaaaagccttcaatgacccttcagctctaaggagccacacaagaactcacctgaaagaaaagccctttgactgtagtcagtgtagtaatgccttccggacgctctctgctctgaagatacacatgcgcgttcacactggtgaaagaccctacaaatgtgatgagtgtggcaaagcctatggcaggagctgccatctcattgctcacaagcgaacacacactggagaaaggccctatgaatgccaggactgtggaaaagccttccagcatccctcccacctgaaggaacatgtccgaaaccatactggggaaaagccttatgagtgcacacagtgtggcaaagccttccgatggaagtccaacttcaatttgcataagaagaaccacatggtggaaaaaacctatgagtgcaaagaatgtgggaaatccttcagtgacctcctatcaagaaggaaacacatgaggattcatattgtaaagaagccagttgagtgtcatcaatgtgggaaaacctttcgaaaccagtccatcctgaaaacacacatgaactctcacactggggagagaccttatggctgtgatctctgcggcaaagccttcagtgctagttccaacctcactgcacacaggaagattcacactcaggagagacactatgaatgtacttcctgtggaaaggtctttggtgattacctgtcacgaaggaggcacatgagcatccatcttgtcaagaagcgggtggattgtaggcagtgcggaaaagccttcaggaatcaatccactctgaagacacacatgagaagccacacaggtgagaagccatatgagtgtgaccattgtggaaaagctttcagcataggatccaaccttaatgtacaccggaggatccatacgggggaaaagccttatgagtgtcttatttgtggaaaagccttcagtgaccattcgtcccttaggagtcatgtgaaaacccaccgggggagaagctctttacgccgtctgtgtgggaaaggtttcagtgaatactcaaatgcagaggaagcctggcaaacataagtcttccatgaccttccatgtagaaaacgcaaaaggtcacatgacacttcagagaaatcagtttgtagaaagtgtgagaagacctgagttgttatgcagcaattgggatctctgtgaaaacctagggactgggaagagtttgtattgagtagcaagaaactgtcaacatgtatcatgctcccaaacacacaagaactgaggcagagagtcttcaccctgagcattagtgctaaagtcagcactactacgtgagcacaccagagtgaatcttgcattaaaaaatggagagcaaactggccagctctttattgttgttggctcacaagccaagatgcttctctctctttttttttttttttttttggattttttcgagacagggtttctctgtgtagtcctggctgtcctggaactcactttgtagaccaggctggccccgcctgcctctgcctcccaagtgctgggattaaaggtgtgcaccaccactgcctggtgctttcttctttttaaaaagaaaaatctggcaggggctgtacatggcactcaaattctgatatacatgctgtttataaaaatcttcatttaaggtttggtcagtagcattggctttcaacctggagcagttttgctgtccagggcacttgtcagtgtctgggtaggttttagttttgagaatggagggagatgtgttagtgatacagaaagaggacatcacagatgctatcaaatagcctatgatacacagaagtcttccatatcaaggaattatgtgtactactataaaagtactgacgttgagaataatctcatgattctcacatgaggagaaattttttgcagctttttaaaagaaaaactgcaatgcagttctctctgaaatgtatgaaaacgcatactgatgataactatgaaaatgattttagccacagtcccatggtgtatgaatgtgaggttgtatttacaagtcttttttgataacaactgagtctagctctttagttttcttgacctttttattagggttagggttctctgaataactcttagtcctcatcataaacaattgaatgtagtattttttttactatagctttgtaaattatatctttatttcactttagtaaccttatcctgaccagagacatgtttagaaatgtgtgatgttctgtactagattgtgtgggtatttttgagtacctgtgtcctattcattgtggtcagagcatgaagcttcctaacagatcctttagttgggtttggctttctatccaaaaagccaaaagaataacaaggacctaggatttcccatatccatttaaactccttttatagcggaagactcacagttttatctgagtatcaaatagttccactataagaaatctttttcagtttttcatgcaacttgtattctctacatgccatgactctggccgttgactcataaatagagataagtgtgtggcattctgagaaaaacctcttggaaaaaaatctgatttttgtttttttaattcattttgtggccctgaagatgaaaactgcagtctaaagatgacagaatagagacatcacagtgatactagtctgtattgtggcttttgaaagagtttaccttggaactcaatttattaaatagactttctcttccctgagaaaacaataaaattgattacaagattaaaaaaaaaaaaaaaaaaaaaaaaaa

SEQ ID NO: 387 - DNA, 2203 bp, Mus musculus
agcgtcctgttgaacgccgctgacctcgccagcacctccccgccaccagcgcccagtgttcttgctcctccaggaaccatcatgtctcgccagtccagtgtgtccttccgaagtgggggcagccgctctttcagcgccgcctctgccatcaccccatctgtctctcgtacgagcttcagctcagtgtcccgcagtggtggtggtggtggtggcaggatcagccttgggggtgcttgtggagccgggggctatggcagccggagcctgtacaatgtggggggctccaaaaggatatcctacagttctggcggaggcagcttcaggaaccaatttggtgctggtggctttggctttggaggaggagccggcagtggatttggttttggtggtggagctggtagtggctttggcttcggtggtggagctggctttggtggtggctatgggggagctggcttcccggtatgcccccctggaggcatccaagaggtcaccgttaaccagaacctcctcacccctctgaacctgcaaatcgaccccaccatccagcgggtcaggactgaggagagggagcagatcaagaccctcaataacaagtttgcctccttcattgacaaggtgcggttcctggagcagcagaacaaggtcctggacaccaagtgggccctgctgcaagagcagggcaccaagaccataaagcagaacctggatccgttgtttgaacagtacattaacaacctccgtagacagctggacggggttctgggggagaggggccgcctggactcagagctgaggaacatgcaggacctggtggaggactacaagaacaagtatgaggatgagatcaacaagcgtaccacggctgagaatgagtttgtgatgttgaagaaggatgtggatgctgcctacatgaacaaggtggagctggaggccagggtcgatgccctgatggacgagatcaacttcatgaagatgttctttgatgcggagctgtcccagatgcagacacacgtctctgacacatctgtggtcctttccatggacaacaaccgcagcctggacctggacagcatcatcgctgaggtcaaggcccagtacgaggacattgccaaccgcagccgaacagaggctgagtcctggtaccagaccaagtatgaggagctgcaacagacagctggccgtcatggcgatgaccttcgaaacaccaagcacgagatctctgagatgaaccgaatgatccagaggctgagatctgaaattgacaacgtcaagaagcagtgtgccaacctccagaacgccattgctgaagctgagcaacgcggggagctggctctcaaagatgccagaaacaagctgacagagctggaggaggccctgcagaaggccaagcaggacatggccaggctgctgcgggagtaccaggagctcatgaacaccaagctggctctggacgtggagatcgccacctacaggaagctgctggagggcgaggagtgcaggctgagtggggaaggagttggaccagtcaacatctccgtcgtcacaaacagtgtctcttctggctacggaggaggcagcagcattggtgttggcagtggctttggcggtggccttggcagcggctttgctggtggccttggcccacgcttcaccaggggcggtgggggtcttggtttgggtagcgggctaagtgtggggggctctggcttcagtgcaggcagcagtcaaggaggcatgagcttcggcagtggtggtggcagcggctccagtgtcaaatttgtctccaccacctcctcctcccggaggagcttcaagagctaagaagagcctgctgcaagaccctggtcctcacgggcagccccaggcccacagagactgcttcttttaggcagtcccccaggccacgtttcctttttctggagagtagtctagaccatgcctgctgcagaaccacatgctttggttcccggaagggaacgaatcccaacctctggcctccccatggctcagttctacatttgtgttgcacgtcagcacctatacatgttctttggtgacccagaccccaaaatgttgcagaatgtaagccaccaaagcagaaccccatccctacccggatacccacctaaattctgtcctggttctgacttcctccagagtctgtccaataaaatgcttttataataaaaaaaaaaaaaaa

SEQ ID NO: 388 - DNA, 2756 bp, Mus musculus
gagtgtagcggccaggcagagttgtggtcttagcgttgctctgcagtggcttctgtgcgtctctcgtctcgtgtccggagctctccagagctgggagaagatccgggcggctccgctgctccctgttcccggcgtccgccccgcttgaggagggccggcccctgggagccgcgcgtgcacgtcctcttggtcgtcctcccggggccgggcgcggggacagccggagctgaggcgtcagggacgtcctgaagactgcgcttacaagggtgcttggagaggagtagttcaaagtgtcaaaaattaggagaaaggtcacagtggaaaacaccaagaccatatctgagagtacatcccgaagacctagcgtatttgagaggcttggccccagcactggaagcacaacagagacacagtgtcgtaactggctgaagactggcagctgcctctatggaaacacatgtaggttcatacatggcccttcacctcgtgggaaaggctacagcagcaattacagaaggtcaccagaaagacccacaggtgacctcagagaaagaatgaagaataagcgtcaggatgtggattctgaatcccagaaacggaatacagaggagccatcctcacctgttaggaaagaatcttcaagagggagacatagagacaaggaagacataaaaattgttaaggagagaactccagaaagtgaagaagaaaatgtagaatgggaaactaacagagatgattctgacaatggagatattaattatgattatgttcatgagttatcattggaaatgaagcggcagaaaatacagagagaattgatgaaattggaacaagaaaatatggataagagagaagaaattatcattcaaaaggaggtttccccagaagtggttagatcaaaattgtctccatcaccttctctgagaaagtccagtaaatctccaaaacgaaagtccagccccaaggcatcttcagctggcaagaaggagcggaaggctgctgtggtggcttctccgctgttggaccagcagagaaattcaaagggcaaccaaagtaaaaagaaagggccgcgcactccgagtccacctcctcctatactagaagatatcattctggggaaaaagtacaaagaaaagtataaagtgaaagacaggatagaagaaaaaccaagagatgggaaggacagaggccgggattttgaaaagcaaagagaaaaacgagacaagccaaggtcttcttctccgggacagcaccattctcctctgtcttctagacatcactcgtcatcctcacagtcagggtcatctattcagagacactctccttctcctcgccggaagagaactccttccccatcctaccagaggactttaactccatctttacgacgttctgcctctccttatccaacccactgtctgtcttctcctcagagaaagcaaagtcctccaagacatcgctctccaatgcgagagaaagggaggcatgatcacgaacggacttcacagtcacatgaccggcgtcacgaaaggagggaagaaactcgaggcaaaagggatagagaaaaggataccagagaagagcgagagtctgaacatgaccacagggatgacagagaaccacgagacagccgggaccagagagacactagagaccgcagggaacttagagactccagagacatgcgggactccagagagatgagggattatagcagagatgccaaggagagccgcgatcccagagactcccggtcagctcgggatgtccatgactacagggaccgtgaagctcgggatgctcatgctcgagatgttcgagatgctagggatgctcgggatgctagggatgctcgggatattcgggatgtccgtgatgtccgggatgtccgggatgtccgggatgtccgggatgtgcgagatgtgcgtgatgtccgagatgttcgagatgctcgcgatgtccgggatgtccgggatgctcgcgatgtccgggatgtccgggatgttcgggatggtcatcgaaaggaggatgtataccaggaagaagcccgcagttatggcagaaaccacctgagagaagagagttctagagttgaactaaggaatgactctagaaatgagtctcgaagtgaaattagaaacgatcggatgggcagaagtagggggagaggtccagaactgcctgaaaagggaagtcgaggaacaagaggttcccaaatggatagccacagtagtggcagcaactaccatgacagctgggaaactcgcagtagctatcctgaaagagacagataccctgagagagacactcgggatccggccagggattcttcctttgagagaaggcatggagaaagagaccgtcgggataacagggaacgagatcaaagaccaagctcacctattcgccatcagggaaggagtgaggagcttgagcgagatgaaagaagagaggaacgaagaatagacagagtggatgagagacgagacgatagggtcagggacagagatagggatcgagagcgagaaagggagcgggagagggaacgagagcgggagcgagaaaaggaaagagaaagagaactagaaagagagagagctagagagcgggaaagagagagagagaaagagagggagagggagcgagaacgagagagagatcagcgagatcgtgaccatgatcgagagcgagaaagagagagggagcgagagagggaaaaagaacgggagcgagagcgagaagagagagagagg

SEQ ID NO: 389 - DNA, 1399 bp, Mus musculus
tgaggaggttctttcctcgtcgctgtttgcggcttctctggtcgagttgtgcggagttctcggccgtccccactggccaccatgtccgcccaggcgcagatgcgggccctgttggaccagctcatgggcacggctcgggacggagatgaaaccagacagagggtcaagtttacagatgaccgtgtctgcaagagtcaccttctggactgctgcccccatgacatccttgctgggacgcgcatggatttaggagaatgtaccaaaatccacgacttggctcttcgagcagattatgaaattgcaagtaaagaaagagacctgttttttgaattagatgctatggatcacttagagtccttcattgcagagtgtgatcggagaaccgaacttgccaaaaagcggctggctgaaacacaggaggaaatcagtgcagaagtttcggctaaggcagaaaaggtacatgaattaaatgaagaaataggaaaacttcttgctaaagctgagcagctaggagctgaaggaaatgtggacgaatcccagaagattcttatggaagtggagaaagttcgtgcaaagaaaaaagaagcagaggaagaatatagaaattccatgcctgcatccagttttcaacagcaaaaactacgtgtttgcgaggtttgttcagcttaccttggtctccatgacaatgaccgtcggctggcagaccacttcgggggcgagttacacctggggttcattcagatccgggagagcttgattcagttgaggaaaactgtggctgagaaacaggaaaaaagaaatcaggatcgattgaggagaagagaggagagagagcgagaagagcgcctgggcaggaggtctggatcaagaacccgagatcgcagaaggtcacgctcccgggatcgtcgacggaggcggtctaggtctacctccagagagcggcggaggttttcccgttccagatcccgagatagatacaggcgccatcgcagccgttcccggagccacagccggggtcaccgccgggcttccagggaccggagtacaaaatacaagttctccagggagcgctcattgagagaggaatcctgggagtacgggcggaatgaacgagggcccactgactggaggctggagaattccaatggcaagactgcatcgcggaggtcggaggagaaggaggctggcgagatctgaatctggctcaggcgctgtaaatagtctgacaaatgttcggcaccgcctaaattaccctttatatttgctgatacaactcatcttttgtagttaaaatttctattgtttggtcctagctgtgagtttctagagttgttcagagctgcccctgtgtttggggttacattgtataggaacaaataaatctggcggctgcctcctg

SEQ ID NO: 390 - DNA, 4555 bp, Mus musculus
cggacgcgtgggtgggaggcaggtgacggcgaccagcggcgtcccaggcgatttgaccgagaggctgagttctctataggaacacccacatttgtatggatgagtggggaaagatagcggcagcagacaaggaaaaagcgtcctgacctcccgagaacatgagtatgctaaaacccagcggcctgaaggcccctaccaagatccttaagccgggaagcacagccttgaagacgcctgctgctgctgcagctccagtggagaagacaatacccagtgagaaagcctcgggccctccatcctccgagacccaagaggagtttgtggatgactttcgagttggagaacgtgtttgggtgaacgggaataagcccggatttatccagtttcttggggaaactcagttcgcaccaggccagtgggctgggattgttttagatgaacccatagggaagaacgatggctctgtggcgggagtgcggtatttccagtgtgaacctttaaagggcatattcacccgaccttcaaagctaacgaggaaggtgcaggcagaagatgaagccaacggcctgcaggcagctcctgggagaactgcttcacctctgtccactgctgcagctaccatggtgtcttcttctccagccactccctcaaatattccccacaaaccgtcccagtcaacggcaaaagaaccttcggctacacctcaaattagcaacctcacaaaaactgccagtgagtcgatctccaacctttcagaggctggctctgtcaagaagggggagcgggagctcaaggtcggagacagggtgctggttggtggcactaaggctggcgtagtccgctttcttggcgagaccgactttgccaagggggagtggtgtggtgtggagttagacgagcctttggggaagaacgatggtgctgtggccggaacaaggtattttcagtgtcaacccaaatatggattgttcgctcctgtccacaaagtgacaaagattggcttcccgtctactaccccagccaaagccaaagccgccgctgtgaggcgagtgatggccgccacgcccgccagcctgaagcgaagcccttctgcctcctccctcagctccatgagctccgtggcctcctctgtgagcagcaaacccagccggacaggactattgactgaaacctcctcccgctacgcccgcaagatctcgggcaccactgccctccaggaggcgctgaaggagaagcagcagcacattgagcagctgctggctgagcgggacctggagcgggccgaggtggccaaggctaccagccacgtgggggaaatagagcaggagctagccctggcccgagatgggcatgaccagcatgtcctggaactagaggccaagatggaccagctacggaccatggtggaagctgctgacagggagaaagtggagctgctcaaccagctggaagaggagaagaggaaggttgaggaccttcagttccgagttgaagaagaatcaattaccaaaggcgatcttgaggtggctaccgtctcagaaaagtcccgaataatggaactagaaaaggacctagcattgagagcacaggaagtagctgagctccgaagaaggctagagtccagtaaacctcctggggatgtggatatgtctctctcccttttgcaagaaataagtgctttgcaagaaaagctagaagccatccatactgaccaccagggcgagatgacttctttgaaggaacacttcggagctcgagaggaggcgtttcagaaggagatcaaggctctgcacacggccactgagaagctttccaaagagaacgagtccctgagaagcaagctcgaccacgctaataaggagaactccgatgtgatagctctatggaagtccaaactggagaccgccatagcatcccaccagcaggcaatggaggagctgaaggtgtcctttagcaaaggcattggaacggactccgctgaatttgctgagttaaagacacagatagagagactgagactagattaccagcacgaaatagaaagtttacagagtaaacaggactctgagcggtctgctcatgctaaagagatggagaccatgcaggccaagctgatgaagatcattaaagagaaggaggacagcctggaggccgtcaaagcgagactggacagtgcagaagaccagcacctagtggaaatggaggacacgctaaacaaactgcaggaggcggagattaaggtaaaggagctagaggttctgcaggccaagtacactgaacaaagcgaggtcattggtaattttacatcgcagctcagtgctgtcaaagaaaagctcttggatcttgatgcgcttcggaaagccaattccgaaggtaaactggagctcgagacacttagacagcagcttgagggagctgaaaagcagattaaaaacttagagactgaaaggaacgctgaaagtagcaaggctaatagcattaccaaagagctccaggagaaagagctagtgctcactggtctgcaggacagtttgaatcaagtcaatcaagtgaaggagactttggagaaagaacttcagactttgaaagaaaagtttgccagtacttcagaggaggcggtctctgctcagacaaggatgcaagataccgtaaataaactgcaccaaaaggaggaacagtttaacgtgttgtcgtctgaactggagaagttgagagaaaatttaacagacatggaggcaaaatttaaagagaaggatgatcgagaagatcagctggtaaaggcaaaggaaaaattagaaaacgacattgcagaaataatgaagatgtcaggagataactcttctcagctgacaaagatgaatgatgaattacgtctgaaggaaagatccgtggaagaactccagctcaagcttacaaaggccaatgaaaacgccagttttctgcagaagagtattggcgaagtgactcttaaagctgagcagagtcagcagcaagcagccagaaaacatgaagaagaaaagaaagagttggaggaaaaactgttggaactggaaaagaagatggaaacaagctacaaccagtgtcaggacctgaaagctaagtatgaaaaagccagttctgagactaaaacaaagcatgaagaaatcctgcagaacctccagaagatgctggcggacacagaggataagctgaaggctgctcaggaggcgaacagagatctgatgcaggacatggaggagctgaaaacacaggccgacaaagccaaagctgctcagactgcagaagacgccatgcagatcatggaacagatgaccaaagagaaaacagaaacgctggcctccttggaggacaccaagcaaacaaatgcaagactacagaatgaattggacacacttaaggaaaacaacttgaaaactgtggaagagctgaacaagtcaaaagaactgctgagtgtagagaaccaaaaaatggaagaattcaagaaagaaatagaaaccctaaagcaggcagcagctcagaagtcccagcagctttcagcactgcaggaagagaacgtcaaacttgccgaggagctggggagaacccgggacgaagtcacaagtcaccagaagctggaagaagaacgatctgtactcaataatcagttgttagaaatgaaaaagagagaatctgagttcagaaaagacgccgatgaagagaaagcctccttgcagaagtcgatcagcctcaccagtgccttgctcacagagaaggacgcggagctggagaagctgaggaatgaggtcacagtgctcaggggagagaatgccaccgccaagtccctgcactcagttgtgcagacactggagtctgataaggtgaagcttgagctcaaggtcaaaaacttggaacttcaactcaaggagaacaagaggcagctcagcagctcctcaggtaacactgatgctcaggcggaagaggatgagagagcccaggagagtcagattgatttcctcaactcggtaatagtggatcttcaaagaaagaaccaagacctcaagatgaaggtggagatgatgtctgaagctgcactcaatggcaacggggaagacctgaacagttatgacagtgatgaccaggaaaagcagtccaagaagaaaccccgcctcttctgtgacatctgtgactgctttgacctccacgatacagaggactgtcccacccaggcacagatgtcggaagatcctccccattccactcaccatggcagccggagcgaggagcggccatactgtgagatctgtgagatgtttgggcactgggcaaccaactgcaatgacgacgagaccttctgaggaagccgggagggcaggaagggcttccccgacaaacgccggctcctcagcagctcccgccagcattggtgtgcaacttcagaagagctccttattttttgacccctgtcaacaaatctgagaaaatattttgatcttcaacaagtttccctttcatttcccctcgtaagttaaaataataataaatatttggtaggtgggcttgcaaaaaaaaaaaaaaa

SEQ ID NO: 391 - DNA, 1944 bp, Mus musculus
ccgactcctgggccacaccacaccaccatgtctgtcttatactgctccagcagcaagcagttctcttcctcccgcagtggaggaggaggcggtggtggattcgtcagggttttcagcaccaggggctctcttggtggagggttgagctcaggaggctttagcggtggctcttttagccgtgggagctctgggggaggttgctttgggggctcatcaggtggttacggaggttttggaggaggaggcagctttgggggaggctatgggggaagcagctttgggggaggctatggaggaagcagctttgggggaggctatggaggtagcagttttgggggtggcagcttcggtggtggcagcttcggtggtggcagctttggtggcggtggctgtggggggggctttggcggtggtggattcgggggggatggtggcggccttctctccggaaacgggagggtcaccatgcggaacctgaacgaccgcctggcctcctacatggacaaagtccgggctctggaagagtcaaactacgagctggagggtaaaatcaaggaagtggtacgagaagcaaggcaactcaagccgcgagagccccgggactacagcaaatactacaaaaccatcgaggaccttaaggggcagatcctcaccctgacaactgacaatgccaacgtgctgctgcagattgataatgcccgcctggcagctgatgacttcaggctgaaatacgagaatgaggtgaccctgcgccagagcgtggaggccgacatcaatggcctgcgcagggtactggatgagctgacccttagccagtctgtcttggaattgcagatcgaaagtctgaacgaagagctggcctacctaaagaagaacctcgaagaggaaatgagagacctccaaaatgtgtccactggcgatgtgaacgtggaaatgaacgctgccccaggggttgacctgactcagctgctgaacaacatgagaaaccaatacgaacaacttgcagaaaagaatcgcaaggatgctgaagagtggttcaatcagaagagcaaggaactcaccacagaaatcgacagcaacattgcacaaatgtccagccataagtctgaaatcactgaattgagacgcactgttcagggactggagattgaactacagtcccagctggccctgaaacaatcgctggaagcctccttggcagaaacagtagagtcgctactgcggcagctctcccagattcaaagccagatctccgcccttgaggaacagctgcaacagattcgggctgagaccgagtgccagaacgccgagtaccaacaacttctagacatcaagacccgactggagaacgagattcagacctaccgcagcctgctagaaggagagggaagctccagcggtggcggcggcggacggcgcggcggcagcggcggcggtagctacggcggaagctccgggggcggaagctacggcggaagttccgggggcggcggcagctacggcggaagttccggcggcggcggcagctacggcggcggaagctccgggtgcggtggccgcggtggcggttccggtggcggctacggcggcggaggttccagcggtggtgctggtggtcgcggcggcggttccggtggcggctacggcggcggaggttccagcggacgccgaggcggaagcggaggtttcagtggtacttccggtggcggcgaccaatcatctaaaggaccaagatactaacaaaaccaaagtgattaggacgattattgaggaggtgacacctgagcgtagagtcctttcgtctatgattgaatcagaaaccaaagaaacacttctattaagctgcatagaagagtctcttcatacgggccactggacagacgtgtggaaaacataaatgtccaagaaacacttttgtcttaatggtctgtggaaataggttta

SEQ ID NO: 392 - DNA, 3406 bp, Mus musculus; identical to SEQ ID NO: 357

SEQ ID NO: 393 - DNA, 3282 bp, Mus musculus
caggagaagccggcgaccttgcgctctcagcctgatccctgtcttggcggcctgaacattcgcagctggagagatggcgttcgtgaagagtggatggttacttcggcagagcaccattctgaaacgctggaagaagaattggttcgacctgtggtcagacggtcacctgatctactacgatgatcagactcggcagagcatagaggataaggtccacatgcccgtggactgcatcaatatccgcacggggcatgagtgccgggacatccagcctccagatgggaagcccagagactgtctgctgcagatcgtttgccgagacgggaagaccatcagtctctgtgcagagagcacagacgattgcctggcatggaagtttacactgcaggattccagaacaaacacagcttacgttggttcagcaatcctgtctgaagagactgcagtggccgcgtccccgcctccctacgcagcctatgctacaccaacccctgaggtctacggctatggtccatacagcggcgcataccccgcaggaactcaagttgtctatgccgccaacgggcaggcatatgcagtgccataccagtacccgtatgcaggagtttatggacaacagcctgccaaccaagtcatcatccgcgagcggtaccgagacaatgacagtgacctggctctgggcatgctcgccggggcagccaccggcatggccctgggctctctgttctgggtcttctagagccttcaacattttctgtgcatagcttctgttagtcctgtgtgcagtaatttgatttgcagggcatttctgtttgtgacaagtgtctttcataataatttaaatagttcttttgaaggtggtaatctaataattgtgactgacctgcatggtaccacaaagaaagcccgaggtatgctgtgagtgagagcctgagtccttccgggtactagcttgcaccaagtctttcttagggacttttggatggctttatgtaaacacacccagttaaatgggcaatttccgtccagttaggtgcagtgttgaattaagggatggctttccttgctatgccaatactaatactgctgatggaggaagatgtgtgcaagtgtggtgaggagagtcacagcttctttaactgtggattctcttctagacccctgctgcgtgttaccctaggagctgtgggctggtggctcctgcaagactatggtgtgaggaccctgtaacgtacctcttggagcacttaggtaccccttgaagctcctaggtatcaccagcaggattggctgctcaggatgcagagggccaccccctccctttaaaaattacgctccagtaatctgcccagttttattttcttgttattcttctgtttgcttttcctggggatgattggcattagtctggagttaggaattgattcgagtgccggtgggtggaggcatgcagggagctgcccagcgacctgctctcagtgtctgctttaggcgtattgattgccagcccagtctgcagagagcctatagagcctatttttctacttgtaaagaaagtatagtgaggggaattggggagagccttacttggaatgttcctgcctcaggccttctgggacccaagcttcacgggatgctctttaactcctggtgaggctcttcctcggcaggcagtggttgggaggccccgtgggtgtccagagagactcaggttttgagtgagaaatggggattgggtagagaccatctcagggattcgttctaatccctcatgttagtggggatccagccttgttctcagtcctgaccgcctcacagcagaagagcttaaaacatttctggtcccaaatgtgtggcactctgagaagctcacaatctggctttctaacgaaaatttgtatttctaaaattagagaatacatgttccacgcatttaaaatttatgttctttcatgttttaaagctcccaaatccagctttgtgactggcatattttagtttcaaacagtaccccggcacaaaggtgggatggcacagtgaaggccccccgccctctactttgcatagtcttgtttctccagggtgctcccaggaagcattcattctgactttgctcagcccagtgcatgcgtgctgccttgccgccgtgctgctgggtagctctttcttggtcagatcaagtcttcaacagatctccatgtgagacagttgccaagtagatgaggtggtgcccatagtgctttctcgatactccttggggacctgttgacacctgcccatttccagctgacatttgtttttctgtcatctctgatagatgggatatgtgacaacatggtacggacgccgtccaacgtcgctttaataagcatgatgctgattttacatcctgtgctgtatgactgccatttgctcacagtgtcaccattgctaaagctccgtgctttacttacaaaacactaaaaccagtggttagtgtttcacagtgattttaattttagagttagttactggcattcctaaagccatagagtactgagtcacatccctgaagtacttttgaaacagaattgtctcctactgtcccatgggtgtgccctgcctgtctcctggccccaatggcgtagctgtaccaggcagccatagttgagcctgatcattcctgtcaccagtttgacttgattatatacccagaatggaatacattcttgggcatctcagttcctcagccctgatcctcatagacgccaccctttcgatggcttttgcggcgtcacttgtacctcagtgagtcctgcgattcttgagttagagggaacgacttgtccagcattgaggaacatgtctcctccactgagacttaaatgatgatgcagggctggaagaggctggctgctgacactgcatcgtggctgatgtcattgctctcctagttctttgatttaagaacctttcatatggaaggcctgaggtccctcagatcgtcccttgccaagaaggcctggcttaggtcattagtgcccacagtagccttctggagtgtagcaagttcctgcgtttgagacagaatggttcagatttattttctacatctgttgttgaccccatgcaccctctcattttgccttccagtctacgtagatgaaagatgaaaggcagaggatgcagacagtcttctttgtgattgcttctgttattctgttgcatctaccgagcccgttttctccctgtctgtgcatacagtatgtttataagtgaacttgttaaaatattaaatgatca

SEQ ID NO: 394 - DNA, 570 bp, Mus musculus
acacattcaagtttatcctcactgcaaaacagttctcctctcctgatatcatgagctactacagcggctactccggaggcctgggctacggctatggtggctttggaggcctgggctgtggatgtaacagcatccgcagactgggctgtggctgtggctctggaagctatggatatggctctggcttcggaggctttggatatggctctggctttggaggctacggatacggctctggctacggaggctatggatatggctgtggccgcccttcatgctgtggaggatatgggttctccagcttctactgagtgaactgctgatcttcagactatcatcattattttgtccatctttagagaggaaagtgctctctttgttatagagaagacatctatggcttattgaatgcctgctctggaaagaactggctttcaattactatggaagaatctataatcttcccatcgaatttatggcttcatctgttatattcagtcaataacattgttgcagatgtgcatgatctatattttaaaatcatcattaataaacatgtttaactaatct

SEQ ID NO: 395 - DNA, 1677 bp, Mus musculus
gagagctctgaggcttggagaatacacacctcatcttcagccaggcacctccctccctccagcaccatgccatacaactgctgcctgcccgccatgagctgccgcaccagctgctcttccaggccctgcgtgccccccagctgccatggctgcaccctgcccggggcctgcaacatccccgccaatgtgggcaactgcaattggttctgtgagggctccttcaatggcaatgagaaggagaccatgcagttcctgaatgaccgcctggcctcctatatggagaaggtgaggcagctggagagagagaatgcagagctggaatgtaggatccaggagaggaaccagcagcaggaccccctggtgtgtcctgcctaccaggcctacttcaggaccattgaggagctgcagcagaagatcttgtgtggcaaatctgagaacgccaggctggtcgtgcagatcgacaatgccaagctggcttctgatgacttcaggaccaagtacgagacagagcttagtctgcggcagctggtagaggctgacatcaacagcctgcgcaggatcctggatgagctgaccctctgcaagtctgacctggaggcgcaggtggagtccctgaaggaggagctgctctgcctcaagcagaatcacgagcaggaagtcaacaccctgcgctgccagcttggagaccgcctcaacgtggaggtggacgctgctcccaccgtggacctgaaccgagtactcaacgagaccaggtgtcagtacgaggccctggtggaaaccaacctccgggaagtggaggaatggtacaccacacagacagaggagttgaacaagcaggtggtgtccagctcagagcagctgcagtcctgccaggccgagatcatcgagctgagacgcacagtcaatgccctggagatcgagctgcaggcccagcatgaactgagaaactctctggagaacaccctgacagagagtgaggctcgctacagctcccagctgtcccaggtgcagtgcctgatcaccaatgtggagtcccagcttggtgagatccgggctgacctggagcgtcagaaccaggagtaccaagtgctgctggacattcggtctcgtctggagtgtgagatcaacacgtacaggggcctgctggagagcgaggactgcaagctcccttgcaatccctgtgccacaaccaatgcttgtgataagcccattgggccctgtgtccctaacccttgtgtcacacgacctcgatgtggaccttgcaacacttttgtgcgttagagacgccattgccagaaggggacaaggataccagttacatcgtaatgccaccccttcccaagtcctcaaagagtcaccgcactggacaaagacggaccagttcttggcttcagttcaagcctagagtgtattttctcatttgatccttgggcacaggagatgcaaagtctgtcttggggagcctacaatactcacacaaagccatatttacatatgcaatgctgtgctttaataaaacttctctaaatgtgactgtaaataactccgttgagtgtggaggatctggttggcaagcatgtgaaacaacatcagtgaacttaacttttctttgttaaactttttgtcttttaaatgcaacacacatcctttgtcttcccaataaattcttattctggc

SEQ ID NO: 396 - DNA, 592 bp, Mus musculus
aacctcaacaaccagaaccatgtgtggctactacggaaactactatggcggcagaggctatggctgctgtggctatggaggcctgggctatggctatggaggcctgggctgtggttatggctcctactatggctgtggctaccgtggactgggctgtggctatggctatggctgtggctatggctcacgctctctctatggctgtggctatggatgcggctctggctatggctctggatttggctactactattgaagacaccacggttcttcctctactgttttgtgtgatacagttcctctaactgtaatttcaggactttgccattcttcacctcatatattctaagccttctgcttagttactgaacatctacaccacagatttctaatatgttctaatatgtcttggtttcttctgtgtctgatatgtccaatcaatcgttttgaaaatttgttgtaaaaagtgggagaatgtgaaatgcatagtctgtgtgcctaaatcatcgtgcattgtcatctctgtcacatatgcttttggtttttaaccaagaggattttctcttttctcaataaatgtattcatctgaat

SEQ ID NO: 397 - DNA, 2213 bp, Mus musculus
gagtggaaccatgggcactatgctgtgcgctctgattctctggtctggcctcctgggggctgccagggccagccccatctcagttccccgtgagtgtgccaagggttcggaggtatggtgtcaggacctgcaggcagctgcaaagtgtcgggccgtgaggcactgccagagtgctgtctggaacaagcccacagtcaagtccctgccctgcagtgtgtgccaggatgtggccgcggctgctggcaatggggtgaacccaggtgctacagagtcggatattttgacatcagtaatgaagacctgtgagtggcttccaagccaggagtcttcagctaagtgcaagtggatggtgaacaaccacagcgcagctgtcctgagcatgctcagtggcgctcaggagactgacctggcttctgtgtgcactgcgctcaccctctgtgaaccattacagaggcacctagctgagactacctcggagagaccgctgacccaggaggatgcaaatgaggtgatggccccattcttatccaacggggcgttgagcttccacccatcacagatgcctgaaggtgctgtgtgtcatgattgtgtccagctgatctccttgctccaggatgctctagagtctaatttgaccttggcagaggtaactgtccagaatcagtgtcagtccatggggcctggcctggctgccctctgcgagaactacatccaccggcagtttgtccctgctaagcaaacattgcagggtctccccccacaggaggtctgcaggaaggggggcttctgtgagagagagtctgcccactggctgactcgagtggccgctgtggatggagtcccctctctggagatggagatgccgaggacgaatgagttgcagatgcagttgggccagacgtgcgacgtgtgcttgaacttggtccaggagctggacaagtggcttgtgaccaacagcacagaagctctcatcagccacacactggagcgagtgtgcaccgtagtgcccgagcctctagtccaacagtgcatcaccctggtagacacctacagccctgaattggtgcagctcatgtccaaagtcaccccagagaaagtatgtgagaccatcaagctgtgtggcagcaaaaggcgggccaggtccatctccagggctgtggcaaccacaccatccctgccggtggatgaggaaaaccagggcagcttctgccaagggtgcaaaaggctgctggggcatgtcttcccagaatctggaccacaagagcaccaagcgggacattctgaatgccttcaaaggtggctgccggatcctgacgttgccttatgtgatgcactgcaaccgttttgtggccgagtatgaacctgtgctcatagagagcctcaagttcatgatgaaccccacggacctatgcaagaagatgggggcctgccacggccctaagactccacttctaggcacagatcagtgcgtcatgggccccagcttctggtgcaagagcccagaggccgctgaaatgtgtaatgccctgggaacactgccagcgcctcgtgtggaaaaagcccgtctccaaaatcaacgagcagccatgaccgtggccaccagaacccaaagtctgcccacccgtaggcttctgcctcccaaggggaccctatgaagtgggtgtcacccccatgtcatagataaaaaactgaggctctgtgcaggtaggggcagagtggagctgaccttcaaaaccatgattccctaaagttgggcagtgtcgtctttctgtctctgtcctatctgccccctctactcctgctacaaatggggagtcttcttccccccttgccccagtaagccaccctctcctgtcatgctgtgatgctgatggcctggagaaacccgtcagcggcctcccttacagggtgagagcaagtaggtaagggtaggtaggtggaggggactgtcactagtcagtataatggctctggggtggaaattgggtattctcaggctaggatctctccagctggctcccagtggtgcagctgggacatgagtgactctggacttttctgaggaagggtcctgagtcattggctaccacccaaaagggacacttggactttatatgactcttgcccatatcctgtcccaccaagaggagtttgtctactcacccagacttgagccgccctggtgctaagcaatctggggtgtacttaaaacc

SEQ ID NO: 398 - DNA, 3410 bp, Mus musculus
gataagctggaccctcctctggaatctgaagcttcctccaaccttctgagttagattgaggggactcattgctgctggatgggctctatttgggaaacgagctccaccctatgtacataccatgattgctaatacctacctgctgattcctcctgtcatgaaccccatcatctacagtgtgaagaccaaacagatacgtaaagctgtgataaaagttttccaatctaaagaaatatagaatcataaaagcctagagctaaacggcctgcttcaggccatgttgtcaattaaggctagactacatcttgaatgtcagttactttagcccctttacttcacagatgaggagacgctgatatataagtgagaagcaatatatagccttatgcctagagttcctcttcctccacaccatttcttctaagctggtgcttttctaactttgtcaatagcccttttattcttatctcatcatagcagttacattttcatattaatttcatattacatcattcctttgtagaaaagtaggtagcattttctaacgctctgccatctactgttcaaagaaacttctctgatgaggattgatagcttcttatagagaaagatgtgtatttagaaggtagtttgatactatgtccatttggcaaaataatagcagtagtttaatcctggggcctgtgatcttcacaaccatgagttcttggtcagatttacaacattagacataaataagtactgtgaagttagctttaaagcacatcataaaacaggtgttttaccctcaaaacattttaccatgatttcacccatgaatatattttgccagttctatcattattgcagcttgtggtactcacagctgggtaaggtgatcagtgacttttgttccctagcagcctggatggcaccttctggtcctatgaaaaccacccagcagggggagcttccagatccctggagcatcagctggtataccaacagcttgttccccgagcctactgagtagcgttataaagagacctggtccggaaagggaaagccagaccctgctgctctccttgagtagaactgcgccattcccaggctgtcagtgtggcctctccctcttccagtccgccccacttggtgtcaacgatgagttcctgcaacttcacccatgccaccttcctgcttattggtattccaggactggaggaagctcacttttggtttggcttccccctgctttccatgtatgctgtagcattgtttggaaactgcattgtggtcttcatagtgagaacagagcggagcctgcatgcacccatgtacctttttctctgcatgctggcagctattgatctggctttgtccacatccacaatgcccaagattctcgccctcttttggtttgactcccgggagattacttttgatgcctgtcttgcccagatgtttttcattcatactctctcagcaattgaatctactatcctgctggccatggcctttgaccggtacgtggctatctgccacccactgcgtcacgctgctgtcctcaacaatacagtaacagtccaaataggcatggtggctctggtccggggatccctattctttttcccactcccactactgatcaagcgactggctttctgtcactccaatgtgctctcccactcctattgtgtccaccaggatgtgatgaagttggcctatacagacacattacccaatgtagtctatggtctaactgccattctgctagtcatgggtgtagatgtcatgttcatctccttgtcctacttcctgatcatacgaacggttctgcaactgccttccaagtctgagcgagctaaggcatttgggacttgtgtgtcacacattagtgtggtcctggctttctatgtaccactcattggtctgtcagtggtgcaccgttttggaaacagcctggatcccattgtgcatgttctaatgggggatgtctacctgctgctgcctcctgtgatcaatcccatcatctacggtgctaagaccaaacagatcagaacacgggttctggctatgttcaagatcagctgtgacaaggacattgaagctgggggaaacacgtgacccttaccatcctatcacccttgtcctacatggcttaatataataacttcaacacatctgcttaattccaatcaccaaaaagcatattagtgcttttccctgaatgggatagtgaactgaagtatggttttatcttcatcatggatataatgtgaatgtgtctatttcgatgaatattatgtgttttaaagattctgctgtaaaatgagacccactgataataccaaatgaaacaacttggatttgtgatttaaactaattattgggtttgtgacttgaatgaaatattttcaaattactaacatttttattcctacttcctttgttataaagctattgtttagctataatgtttaacttctgaaatgtggagcatgaagctgacagtatgtttcctcgctcatttcaattttattattcagtacccaggaacatatatgagctctgaacaggaaggcttatgtgtatcatgtatgcttaacatgttccagatcctgtgataagtgcttttccacctttctgtgttcttgttcttttcccagggaagataccacttttgcccaccacacatgtgatagaggctttaatgagcaaagaaactctcttgtatgtgctgtgccaagattgtaaattaaatttgataattgaatgcatttgctttactaccatgttatattgcttcctgcttaacatctgccatctatttcctctgcctattacaaatcctgttttctctttgtcgtgtgctaacatggatgtcttgtgtttgtggtaagtgattaaccatgttctggtggcgggtaccaaactgttcttcatgatagagtagctgcttcctctcagatgaacagaggaggtttaaattttttagtctctttcatatctttgattatgtcttctttgtattgtgttcttcggctgtcaaatctcttgaatatataacgtatgacattgtctgagtcttgacttaggtatcaaacaacatagtaatttatcttaaaatgttcagtattattttcactgtttttatgttcataaagtaacattgggagatatgagtgatcctccagtcctctttaccaacactgcaaagggcctgctggatatgggttgtacaactatagagatgttgaatgaacttatgtgatgtagaatattcccttcatactgagtggatgatgaaaaggttctaagattaggttttagtgatacctacaaaataatgttaatatactcaatgtacacataatgcttaaaatgttgaaatttatgtggtgtgtatctgccacaataaaaaaaaatcattt

SEQ ID NO: 399 - DNA, 7019 bp, Mus musculus
ctttgttggattttggttgtcatcccagtctccaggattctgaaggtgacacccctctccatgatgccataagtaagaaacgggatgacattctggcagttcttctggaagctggagcagatgtgaccatcacgaacaataacgggttcaatgccctgcaccatgctgcactgagagggaaccccagtgcaatgcgtgttttactctcaaaattaccaagaccatggattgtggatgagaagaaagatgatggttatactgccttgcacctggctgccctgaataatcatgtggaagtggctgagctgttggtgcatcagggaaatgcaaacctggatatccagaatgtgaaccagcaaacagccctacaccttgctgttgaacggcaacacacccagattgttaggcttttggtccgtgcaggtgctaagctagacattcaggataaggatggagatactcctctgcatgaagctttgagacatcatactttgtctcaactacgtcagctacaagacatgcaagatgtgggcaaggtagacgctgcctgggaaccttcaaaaaacacattaataatgggacttggtacccagggggctgagaagaagagtgcagcatccattgcgtgtttcttggcagccaatggtgctgatctcagcattcgaaataagaagggtcagtcaccactggatctctgtcctgacccaagtctctgcaaagctttggcaaaatgtcataaggaaaaagtcagtggccaagtgggttctcggagtccttctatgattagcaacgattctgaaactttagaggaatgtatggtgtgctcagacatgaagagagatactctttttggtccgtgtggacacattgcaacctgttctttgtgttcccctcgtgtcaagaaatgcctcatttgtaaagagcaggttcagtccaggacaaagattgaagaatgtgtggtgtgctccgacaagaaagcagctgttctctttcaaccttgtgggcacatgtgtgcttgtgagaactgtgccagcctgatgaaaaagtgtgtgcagtgtcgggcagtggttgagcggagggtgcctttcatcacgtgctgtggtggcaagagctcagaagacccctctgatgaaatctcaagtgggaatatcccagtgctgcagaaggacaaagacaacaccaatgttaacgcagatgtgcagaaactgcagcagcagcttcaggacattaaggagcagaccatgtgccctgtgtgcttggatcgcctgaagaacatgattttcctctgtggccatggaacatgccagctctgtggagaccggatgagtgaatgcccaatttgtcgcaaggcaattgaacgaaggattcttttgtactgattaagaaacacagagtgttttgttagctaaagtatgtgattgtgagatcttagtatgttctaaaactagttgggagttaatctaatgagttaatttgtaatttcataatttctttttttattttattttattttttttagactgtaattagactatatatggaccaccatcacaacgaaaacatacagtgtttgaacttgcccgtgtgtgtgtgtgtgtgtgtgtgtgtgtgtgtgtgtgtgtgtgtgtgtgttttcctcttgaatttggaacatcaaatccatgaaaactcatagaaaatttgcttttggctttgaaggggaaaatcctttaaggactgcctttcacatttttcttttttaatatgtgcatatatgttaaaccttagacattagcttacaaggtcagtattccacatgattatcatgatttcacatggtgaaatgacatgctgttctaaaaggtcatattgaaggtgagtggggcaagtcagactatgtcatttatgctcagtgacagaagtgtagtagagatatgcctcctggctaaggcagtactgaaggaaacattgtatttcaagataatttaaagttatccaaatgattgtttccgcatttttaagtaagtgaaaatatgtggtaagagaataatgacttaaccttcttttctagacttaaaaggaaaattgactaacttaaataaatgaattatttcaaaatcaccagtagacatgaaagggcaaattgtagtaagaactgaaggctagctcggaatgacacaatcacacctctacctggttttcactgttggacttcttgtattaacttctcactgtttgcatcagctctttgtagaaaaagatctgtgaaaagcaatttccgttttccctgtgactgctgacctgggcttgatctaatcagtgcgtgcacaccgtcctttctgtgtctctgaggtctctaagctgggtggtgcattgtaagaggcagcaatcttttctgtatgtctgttatttctgacagtgttacggattctaccttcatccagagccttacttcttttctctctgatagtaattttactataaagaacttagtttttctttatacctacagatgaacattctttaaactgccaacatatactaagatacaataaatagcttaatgtcagatacttagaaaaggatgctggggcatttgtggaaaagcatggaaaacacatgttgacttggttagggggctaagcattttgtctccttaaatgagtaatctttgtatctagcctaaatgtatgcacattgtttcaagattcttcactgctagattgttaaaaacaaaaacaaaaacccacctatcagttatttacaatagtgtccactgtgcgctgtgtataagcatgcactcttaaggatagtgttctttgaggatagtttcccctgcatttgaatctggctagcttgtgtctgtttttttgctatagcaacttaaagtgggagagcagtgtccagcctgctgtgctgtgctgtgctgtgctgtgctgtgctgtgctgctgctggttacttgcggcccagtgagctgagctgctcgttgtcagcaggctcagcagtcccatgtctgtgttgagctgagtaactgctttgtttctctttcgtgtttttgagatagagtctcactatgtattctaagctgacatggaacctactgtgtagctcaggctagcctcaaccttatgatcttcctgcctctgccttccaattgtggggttgtaggatggcgatcccacatatttaacaactttaaattattttggagggtacaatccttattagtttcaaattaggaatgttctattgtaaggaagcaatgaggctatttttttctaagtataatttgaagagtttttttgtttttttaaagatacatctgatgatacgatgtttacataaagagacaaactatcttcttgcagacttggaaagagtagaaatgaggatcttttcttccttgccataggctgcccacctctttctacttgtcatcaggcaaggaggggtggctgctatacagtctgccagcccgagaacctgtgtgccacagctgtatcccacttcactcctttctctgtctcccaggctgcagtgccaagtcttatcctgtaaagattctatctgttaagggatagacctcctgacagcttcatcatctccacgcagagcagagcacactagcttaggagagagaagccgtcaagtctctgtagtgctggggacttacagctttctctttgtcactgggccatttatgttatgtatagtatggacagctgcacttctcttcaggtcttcaggcatctaaaattattgtaaatttgttttgggcttacaggagatggtaagaccaggaactgaatcatgccagtgacttcctcctgcactctgaaactacctcttagtctctttacaacacttggccctttggggatctttccttctagttacccaaacctctctttcctgtgcctcagaagaattcttacttttccttagaattattattacaatgacatgcattcgtttgtttttttttaaagtattggacttgggctaagtggggggcaggaaagaaggtcagtgtcttgtgtctgtggacaacaggatagggtcctgaggcatgttagcattcctcactggtgtttcaggagagctgtcgggagcaatattagattccctctctatgcccctcggcccaccacattttctcctttattcacgaagaccgtcggctttctcactgagcacagacataacttatcaggcgctgctgccacagctgctcttgttcacatagtttaacatccttacctgtgctgtacacatgcagaattttattgggagtggggttttcaagagaatataattttatattagtgtaagaatattatactaggcaaatgtttagttatctgaattacgcttaaggtattgtaatttaataatggcaggttaaccagaagtctactgaaacgtaaaattaactggaaataattccttaaattttatatttttgaagactttagcctgaaacaaccttttactttagaatgttgaaaatgcatgctgcttaagatttgtctagttcaaaattcaaaccttgctgggtcatttttacacagggaacatcctggtagccatgtattgcctggtggatgttttttgtttattttgaattctggacacttttgggataaagaatagttaaacttgccacctaggacaaagctggatgtagcagagctggtttgggggtttggggttgcaacaaatagaaaacaaaaacagtgagctcagaggaatggagcatcatgtaggatttgccacggtattggtggggagggcgtatttaactaaaacatagaagggggtctataaggtcacttcttcatatggcttgtcagttgttttgtaaattacagactttaacacgacttgctcttttaagcccaaaaggaaaaacatttatcctttcagagtgtctggaatgtttatagtaataatttctataaaaacactcatggatacatttttggtgtttttttttttttttaaattgcagtgagaaccacatatcataaggtttgtcgtcctgactgcttctaaacatgcagttcagaagggtcacttcctctccgtttgttgggaaacacgcatagaactttatcctgcacctatcaaaggcttccttcttccttccatctgggcaacagggttctgactacttagaacaccagcactcagattgctgactagagtcatttgtgtttgcaagacccaaacctgggtcaacatcaggctcctgagatttgaggaagggcacctctcccctgccataactgctattttttttacatgtatgttaattgaaagagtttattatttcgttatgagccagaggggggaagcacattttaaatatgggaaataagttagctttggttttgtactgtattgggaaggtaatagatttttcacaagttatttgtgccttgttataaatgtcaattgtcattgagtctacttgtcaaagtcacagaatacatttttctttcaaaatggcaacctgatttagcttgtttgaatattacaataggaatgcttactgatactacttgataatcatgtatatccttttgacttacacacacaaacacacatgagacaacaggattgataattgcagttgtatgtctttaaacactaaacgtaggaagctttttaatgttgccttgtgtgtgtgtgttgctttactgcagtgagggagaaatcctttgcaccaagcttcagtggctgataagtggctagcagtgggtaaaattacaatgtaaaaataggggtggatagttaataacgttaagttgctaccttggcattttctacctccttttctacgagaatactgcttttctttcacccatctagcatcttgtcttatttgtgggagaaaaggaaacaacctgaagataaagttagattttcttttttttttttttttgagaatttaagcaatagatacaggaaaagtggcctgtcacattaatttggtgcctaaatgtaaaggtttgaactgataaataaaactgtctaagaaggagagtagtgctgagtatttggactgtcctgtatagttctcttgattttatttcataaacatgacttctttcttcaaaagcaaagtggttttctaattttttatgaaataagcaaatatgccattttgtctgagtacagtttcaggaagctattgaaagttctggctcagggctttttaacagttaaagcaattgttaatatattttggaaactccatctgcataactcttcagtgccttgattaacttggcaacacttaaaaaaactttgtactaggtaaccttcagtgcaccagtcatgatatgcacgttctgatcatactgctaagcatgtgcaagaacacctctacgtgtgggtttgcataattctataagggaagtgttctacatttgcacttgatactttttttttattattattactctgtttttttacaaactgattattcaaggccatggcactgttaccagaaaaatggtgtttgctgtctatatgcaagtctatttagctgctggggagaggacagagctcacactttgtatctaatacaaaaagaagatcaatacaaaaaaaaaagatcatcttcctctcaagtggaaaccaaaccaagccaaaccctttgtttaagtggctcagttaaatgattaattgaaaggaaatcatgaattgcatgtcattcttcatgctgatctgtagactaaaagcatgtttttctgtctccttcaggatgtgtctgccattctaagtacagtatattcaaatggtagaaaaaaaagctgactcaaaggttttacgctttgtaatttttccagttctttttagctttcaatgttggaataaatttaagtcttgtttatggctaaagtttctgtatggaaaaatgattcttgcttattagcttttgtttaagaaaaaaagcttagtaaaaactaagcttttaaaaataaatgcaaacatttaccattaataaaaaaaaaaaaaaaaaaaaaaaaaa

SEQ ID NO: 400 - DNA, 273 bp, Mus musculus
cccaattcatatcgagtttgagaatttttctacttttgtacatcctggcctagggggaacgtactcaagattttgtacacatttttcttgtttgggtccaataaaagttcaaagagtgatggcaaaagggaaagggaaatgtatgaacagaggacaaatttctagaggtctttttattatacttagatgctcacagtactttgaggctttatactacctggaagacatttttgttcaaataattggactgttaaaaatcaataaatgtttggc

SEQ ID NO: 401 - DNA, 714 bp, Mus musculus
tatctattactaataaggcaggggaattaagaaaaggggtattaaataatttttccattagtagatagatgtttgttataacaggagagaatatataagaaggttacttagtctagttttgtatgacctgatgtgtacagccagtgtaaataacatttttgaaagggccttcagcatctttagcataggattcaccattatattctcagtaatgttttaagaaaatgctaaactatataataagtagttatttgcatgagtttaaactgtaacactgtcattagctcctaataataaatcactaggtggttatattgtgttttgttactaaatgttaaaatactgaaaaattcatttttctattatgtttaagtggtatcattgttaatatttttaagtggattaacatttacctacaatgatctctttaacctttttagtaagttttttttgtgtatgtgttttaagatgatgtatctgtaaatatggctttttaaaaatcatcattgtactgaattcatttcttgtgttcctgtaactagtcattttagccactagttatctaaacctacaatagagtttattcatttcagttactctgttcttagaaactaactagtgtttgatctactacaagagaacgctgtgttcacacatgcataaactgtaagtggttaaactctctcttctgtgaagaattcatggatgactttg

SEQ ID NO: 402 - DNA, 3001 bp, Mus musculus
gatgggactcgggcaccaggaacagcggcggcagcccttggaggggaccagcgcagcggggaggtgagaggtgcttcctagaggggagcggacaccaagagaggtcgccaagtgaggcctggggacgggagcgccggtcgagtcagcgccaaacagggagagcccattacgtgactgtcccgagggctcgggctcccagcccttgtactgcgcaaaactgggcggtgagagccggctgccggtgcgctgatgaactttgtttcctctagagcgtgatctcggagtcctccgggcagctgcttgtcttaaaaaatgctggaggctgggcgggggcccaggcctgggaacctgttcttcctgtttcctgcctcagtcccagcagctggtccaggcctgtgcatatgtgagtgaagaactggagcaggcgctgagcatcctcaccacctcaagagcaggagctgatcaggtccagggcaatggcagcagacctggaaccctggaatagcaccatcaatggcacctgggagggggacgaactgggatacaagtgtcgtttcaacgaggacttcaagtacgtgctgttgcccgtgtcctatggcgtggtgtgcgtgctcgggttgtgcctgaacgtcgtggctctctatatcttcctatgccgcctcaaaacctggaacgcctccaccacctacatgtttcacctggcagtttcggactctctctacgcagcgtccctgccgctgttggtttattactacgcccggggtgaccactggccatttagcacggtgctctgcaagctggtgcgtttcctcttctacaccaacctctactgcagcatcctcttcctcacctgcatcagcgtgcaccggtgcctgggagtcctgcgccctctgcactccctgcgttggggccgggcccgttatgcccgccgggtggctgcggttgtgtgggtgctggtgctggcctgccaggcacccgtgctctacttcgtcaccaccagcgtgcggggaacccggatcacttgccatgacacctcggcccgagagctctttagccattttgtggcttacagctccgtcatgctgggtctgctttttgctgtgcccttttccgtaatcctggtctgttacgtgcttatggccaggcggctgctcaaaccggcttatgggaccacaggaggtctgcctcgggccaagcgcaagtctgtgcgcaccattgccttggtactggccgtcttcgccctctgcttcctgcctttccacctcacgcgcaccctctactactccttccgatcacttgacctcagctgccacaccctcaacgccatcaacatggcatataagatcacccggccgctggccagcgccaacagttgtcttgacccggtactctacttcctggcagggcagagacttgtccgctttgcccgagatgccaagccacccacggagcctacccccagcccacaggctcgtcgcaagctgggcctgcacaggcctaacagaactgtgaggaaagatttgtcagtcagcagtgacgactcaagacggacagagtccacaccagctggaagtgagactaaggacattcggctatagcacctcagtcaggtgtcagtttatgtaggggagctgtaggggaccaaggcttgttaaaggggctgatatcctctgatgcggatcaacagctctcacttggcaggggctcaggatactcatcttgcggtcccaagagtagcaggactccaaagtccccaatcatttgtacgtgtgagttgggaaaccatatcttaagaaaggcagtgccacccgactcctatgcagacagctgccattcctgccaaggtacctaggctgaggttcagcctcccagatccaagggggaagcaggctcagagaggacacagcagagcccaggctacctggattaggagtagaatcccaaggtgactggagggctcttgttcccatggtgatgtaggatggacctgggcacgatggacttagctcagaggaggaccctcaggccaagagacaaacctctgagagctaatgtcaggtccctggagactcccctggctggcagcaggtgggaaccataacttatatgaaaggctgtgccacccattgggctgtgctctggggcatgacctgggaagctgtcaccacccacacaaaggcctgttatctctgcctcctgccttccttcagtagtaggaagtcttggatgggtgtgtgtgtgtgtgtgtggtgggggtgatcccttctcagtcccccaggtcaaccctgcctttcagccacttgtcttctgtattgtactgtgccaagcatggagaggagtcaaatagagttctggttcttggggttccccagttcacaaaacctctcatgtgctggcaaatgtcaaaccattaactgaactgggttggggaggggcttttatttataacactgccaatccctgtggtgcaagcaattccactgtggccaatcctatttcaatttaaaattaccaatacaaaggcgaacccattgcaaaattcctgaaaaatcaacaactggttcttttttctgggctcgtgggggagagtagtgtagctgatgaggctcatctcggagaaccaaaggcggactttgaattagccatgtagctgaaactggccttgaacctcttaccctcttgcctccatcgacaaagcgctgggattacaggtagatgccacacctatccaacaactggttcttaaaagcagatgcagggtacttcagcacaaaccatgctgactagctgggaccgtgtgagccccagtcagggaggggtccctggaatgcatgacagtggaccatgccagctctggagtttaggcaggaatgggcaaaggtgacaagcctcatgatctcaaggacaggaggtcccttgtaaggaccctctccccattccaccctgcccatttcctctatctcccctcccccctctcagccattaaagctgaggcatcacc

SEQ ID NO: 403 - DNA, 525 bp, Mus musculus
agggctcctagctcctgagcactgaagaatgacccttcgctgggccatgtggctgctgctcttggcagcctggagcatgggctatggtgaggccttccgatgctatacctgtgagcagcccacggccattaactcatgcaagaatattgctcagtgcaagatggaagacacagcctgtaagactgtactggagacagtggaagcagcgttccccttcaaccacagtcccatggtgacccgctcctgctccagctcgtgtctggccaccgaccctgatggcattggcgttgcccatcctgtcttctgttgcttccgtgacctctgcaactcagggtttccaggcttcgtggcaggcctctagccacacagggagcctcctcgttccttctctatccactctcccggcagggcccggtgctgcctgcagtcgtctctacatgcctggatctatgagcagagctcactgagcctcaggtcactcactgtccaccaagcttgtggaaaataaaataaaccaagggcgaa

SEQ ID NO: 404 - DNA, 1539 bp, Mus musculus; identical to SEQ ID NO: 214

SEQ ID NO: 405 - DNA, 4157 bp, Mus musculus
ggcagaaggaagtctgggcttggggctttgatggcggaggatgggaagagtcacttctataaaataattcctcctgggcaaagtgtttggagccaaggcctccccaggcaatctttttcctctctctcttcgatcacctcgcagcctccagccccttcccctcggccccatctcctgggtttctccgaggggtgccaggaccccctgccgcagcctcccctcccccgtcactctggtccggccctcccctcccccatcgcggaccgcacagccaatcccccaagcggctgccaacatgctgtttgaaggcttggagttggtgtcggcgctggccaccctcgccgcgtgcctggtgtccgtgacgctgctgctggcggtgtcgcagcagctgtggcagctgcgctgggctgccacccgcgacaagagctgcaagctgcccatccccaagggctccatgggattcccgctcatcggagagactggtcactggttgctacagggttccggcttccagtcgtcgcgccgggagaagtatggcaacgttttcaagacacacttactggggcggccgctgattcgtgtgaccggtgcggagaatgtgcgcaagatcctactgggcgaacaccagctagtgagcaccgagtggccgcggagcgcacgcgtactgctgggtcccaacacggtggccaattccattggcgacatccaccgcaacaagcgcaaggtcttctccaagatcttcagccatgaggcacttgagagctacctgcccaagatccaactggtgatccaggatacacttcgagcctggagcagccagcctgaggccatcaatgtatatcaggaggcccagcgacttaccttccgaatggccgtgcgtgtgctgctaggcttcagcatccctgaggaggacctgggccacctctttgaggtataccagcagtttgtggagaatgtcttctctctgccagtggacctgcccttcagtggctaccggaggggcatccaagctcggcagatccttcagaagggcctagagaaggctatccgtgagaagctgcagtgtacccagggcaaagactactcggacgccctggacattctcattgagagcagcaaggaacatggcaaggagatgaccatgcaggagctgaaggatggaaccctggagttgatcttcgcagcctacgccacgacggccagtgcaagcacatccttgatcatgcaactgctaaaacaccctgctgtgctggagaagctgagggaggaactgcgggcccagggcctgctgcatggcggtggctgcccctgtgagggtaccctgcgcctggacacgctcagcagcctgcgctacctggactgtgtcatcaaggaggtcatgagactcttcacgcccgtctcaggcggctaccgcactgtgctgcagaccttcgaactggatggtttccagatccccaagggctggagtgtcatgtatagcatccgagacactcacgacacagcgcccgtgttcaaggacgtgaatgtgtttgacccggaccgcttcagtcaggcacgcagtgaggataaggatggccgcttccattacctcccgtttggcggtggcgtgcggacctgcctgggcaagcacttggccaagctgttcctgaaggtgctggcagtggagctggccagcactagccgcttcgagctggccacccggaccttccctcgcatcactctggtccccgtcttgcaccccgtggatggcctcagtgtcaagttctttggtctggactccaaccagaatgagattctgccggagacagaggccatgttgagtgctacggtgtagcctcactctggtctcagcccagcccaacagcaggggtgggggacagagatagaaacctgtggggtggggaggggctgggtgggaggccagcagcccccctatgttgttctctggcctcttccctggcagaacctcccccaaagacaaaagggccccgccccctcctgactccctctctcttggatctccactgccacctagcttagctcctgggacagagccaggactgtatgcccatgacagtgttagcgccggccggttgagctgcagtatatgcttatgacatctgaatccttccttcccttgcccccttgtctttttgttggtgagtggtcaggtggctctgaaggcagaagggaggaaaagagggggccccttggagcactctttgacacccccccccccacgtccctctttctgtcactgatcaaatggtgaccagaacagtgttctggagattctcgcctaagccaaccgaggcagggcagcggctgccaccagccttgaggggcccataccagcctaaccagtttggacattggaaattacctatcgctgctatttgtcctctcttctgaccttgggggtacaggagcctataggcttaatcctcagcatcttccttggtggccctggacagggacaccggcatgcctcccccatgggaccaactgagccgggtggcttctggctatagctgggctccccgctacctacccttgcccctgtcccatatttattcactgaccttggccagactgaggtctggagcaccctcccccaacacctacacaccgccattgccaccacacgcacacacctgccagcctctgtcctttccagggcttcagtgaggcaagaagacagtgtgtctggtctaacccagttctttggtagagggttaacagccctgctgggctctaggcaaaagatgtagtttaacctcagagtcagacaccctgcatctctgccaggtgtacttagcacctcctcccaggctgtcaaagccctgggcatgtgggtctaggggccaccacttcctgttcactcactgcctgtcccagtgccagccactcccctggtgaggatgaataaggatacgggttcttctgaagggacttctgtcttcccttccttagctctctgcccctttgctcttggaagagtcccccaccccataaccactcccaccccatgccactgtctgctaagcccagcccagggtttggggtagagaagaaagcagagaggtaaggtggaaagagagtcctctctctgagctgcttcaggccctgtggggtctggagaagctgcaggggaggctgtagctagaaagcaatggagaaggagaggaggaagatgagggcgattgaggtcagggcataagtgatttgtcagaagtggttcagttgcagaaaggccagtgggggtgtggaagatgactgggtggaagacgagggattcctgcctctggcattttgagggttggccatgtgggaccttcctgggaagggtttggggttctggtgtgtctctaggcaattttgtctgttttcagattccccttcattttccgtccatggcttttgcctgttactaaggtagtggctctttttctccagaaaacagaggcacagaatgacagtccatatcgatctgaccctggatggccactgtcatgagggtcagccacatctcaccagccacacagaacatcctatgagccacatttcttgatgtttcactggtctgcattttttttttctgacagaaccagaacaaactacagcattagaatcccagcaaaattattgtggagtcaaacatagctgtcagccctcagctccctttccctgttctaaaacaggccagactgtgtaaagactcagcaaagtttatgaaaaaggtgcatgctgcccataccccacagaccagtgcccgggaggctcatcttcctgcacgctaaccctgcctgcctgcagccatctgcttcagactgacgatgtggcatgtgactctggtcctggtgagggatgggcactggggggcccctccaggcgtcagaggccttcattttcagggggccggccgaggaagtgtgaaggaaaagctgaaggggatccctgtgggggtgggaggaagaaaagatggtctgcccggatgggtctcagaggtaacaggaaaagagacctcgcctcagcacctgcggtgtgatacccgtctcacctctgtagatgtgtctgttccgtgttcgtgtgtctcgttgtggtagcattaatgggtgatgtagtctcacattcctaactattgtaacttgacattt

SEQ ID NO: 406 - DNA, 1407 bp, Mus musculus; identical to SEQ ID NO: 375

SEQ ID NO: 407 - DNA, 1344 bp, Mus musculus
ctcccgatgagttcctatttcgtgaactccaccttccccgtcactctggccagcgggcaggagtccttcctgggccagctgccgctctactcgtctggctatgcggacccgctgcggcactaccccgcgccttatgggccgggacccggccaggacaagggctttgcggcgtcctcctattacccaccagccggcggcggctacggccgggcggcgccctgtgattatgggccggcgcctgccttctaccgggagaaggacgcggcctgcgctctctccggcgccgacgagccgcccccgttccaccccgagccgcgcaagtccgactgcgcacaggacaagagcgtgttcggagagaccgaggagcagaagtgctccacgcccgtctacccgtggatgcagcgcatgaattcgtgcaacagttcctcttttgggcccagcggtcggcgaggccgccagacctacacacgctaccagaccctggagctggagaaggaatttcactataatcgctacctgacccgccggcggcgcatagagatcgcgcacgccctgtgcctgaccgagcggcagatcaagatttggtttcagaaccggcgcatgaagtggaaaaaggagagcaaactgctcagtgcgtctcagctcagtgcggaggaggaggaggaaaagccagccgagtgaaggtgctgcaaagggaggggggacgcgaagggagaggtctgtgggggaacctagggcacccgaaagccccagaaggctctgcggtcgggggagtctggggacttgctgtccagagcacgacgggcagggcccagtgcttgcctggatgcccccttctgcagagctcttcctgggcgcttggcggatgcccacccagcacccccagcgcctcctccctcccccgaagaacccaccttggcctcatcaggctctctggtgagaactgagaatcggactcacttgatgtctcctggaagcagagcagaatgctcatgtccttgtcgagtctcatttcgtccatgtcccccgtgcacggttcaatggtagattcgctgtcccctcagcagggacctgaaagactccctgaccccagacttgtctctcctaccccctccccaaagccactggaaggagcacatactacctagaaggaagaagaggagcctcagaagaaaacaaagttctattttattaattttctatgtgttgtgtttgtagtcttgtcttagctccggacgtgaaatacttcggtaataatattaatattattaataatgattatgatgatgatgataataataataaagatgtgaaaactcgcaaaaaaaaaaaaaaaaaaaaaaa

SEQ ID NO: 408 - DNA, 2277 bp, Mus musculus
tctctgcatcctccctgccttcccaacaacatgtatcttgtcagtttgctcagctcctgctgcctcttagtgctcctggggactctgcctgcccgggcagcccatgaggatcccgttgagaaggtcatagaagggttcagccgagggctgagcaatgctgagagagaggtgggcaaggcccttgaaggcatcaataatggaatcactcaagctggaagggaagtggaaaaaatttttggtgaactcagcaacatgggcagccaggctggcaagaacgtggaacatggcttggacaaagtagcccacgacatcaacaatggcatcggacacgcaggaaaggaagcagagaagtttgcccatggggtcaaccacgccgccggacaggttgggaaggagacaaacaaaatcatccatcatggggtcagccaggggggcagtgaagcagggaagtttggtcaggggtcccaccatgcttttggtcagggtgggaatgtggcaaacaagttaggtcatgaaacccaccatgcttttggtcagggtgggaatgtggcacacaagttaggtcatgaaacccaccatgcttttggtcagggtgggaatgtggcagacaagttaggtcatggagggaatgtggcagacaagctaggtcatggaacccaccatgcttttggtcagggtgggaatgtggcagacaagttaggtcatgaaacccaccatgcttttggtcagggtgggaatgtggcagacaagttaggtcatggaacccaccatgcttttggtcagggtgggaatgtggcagacaagttaggccatgaaacccaccatgcttttggtcagggtgggaatgtggcagagaagttaggtcatgaaacccaccatgcttttggtcagggcggaaatatggcagacaagtttggtcagggggcccaccatgcttttggtcagggcggaaatatggcagacaagtttggtcagggggcccaccatgcttttggtcagggcggaaatatggcagacaagtttggtcagggggcccaccatgcttttggtcagggcggaaatatggcagacaagtttggtcagggggcccaccatgcttttggtcagggcggaaatatggcagacaagtttggtcagggggcccaccatgcttttggtcagggcggaaatatggcagacaagtttggtcagggggcccaccatgcttttggtcagggcagggatatggcagagacatttgatcagggggcccaccatgcttttggtcagggtgggagagagggaggcagactggtgcaaggggctggtcagggacttagccatgctgcaaaggaggcacagcagtttggtcatggtcacgggcatggttattatgctgcggggcagacttggcaagaaggagacaaagtaattcatcccggggtcagccaggctggggaggagatggagcagtttggccagggtgtccgccatactattaaacaggctgaaaaggaagcagaaaaagtggcccatggggtacagaatggagtcaaccaggctcaaaaggaagcagaaaaagtggcccatggggtacagaatggagtcaaccaggctcaaaaggaagcagaaaaagtggcccatggggtacagaatggagtcaaccaggctcaaaaggaagcagaaaaagtggcccacggtgtccaaactggggtcaaccaggccgggaaggagacacagagagttggccaaggggtccaaactgggttcaaccagggtcaaaaggaagcagaaaaagtggcccatggggtccaaactggggtcaaccaggccgggaaggagacacagaaagctggccaaggggtcaactatgctgctggccaggccgagaaggaagcggagaagcttggccaaggtgtccaccatgctgctggccaggaaatgaacaggttgcagcaagatgttcataatggggtcaaccaacccagcaaggaggccaaccagctgctgaatgggtctcatcaaggtcaaggcgggtacggaggccagcacggaggggccgcaaccactacagtagtatctggggcctcggtcaacaagccatttatcaacttcccagctctgtggaggagtatcgccgccaccatgccctaaactgatgcccaggcaacagaatgctccggttgtcacaccagctgaaccgacccagaggagcaggggcttggggagagcttcctgggtgcccttgagagggctgctttgagctttgtgaataaacttgaacatactctccctttc

SEQ ID NO: 409 - DNA, 3145 bp, Mus musculus
tcgccttgcctgccaggggtagtgaaccggctaagcggcatggagaagccggaactttggggtgtcctggctctcctcctcctctgctcttacacgtgtggcagtcaggaccttcaggtaattgacctgctgacagtgggcgaatccaggcagatggtagctgtggcagagaagattcggacagctttactcactgctggggatatctacctcttgtccactttccgcctccctccaaagcaaggtggtgtcctctttggcctctactctcgccaagacaacacacgatggctggaggcctctgttgtgggcaagatcaacaaagtgctggtgcggtaccagcgggaagatggcaaagtccatgcagtgaacctacagcaagcaggcctggctgatgggcgcacacacacggctctcctgcgactccgaggaccttctcgacccagccctggcctgcagctgtatgtggactgtaaactgggtgaccaacatgctggccttccagcactggccccgatccctccagcagaggtcagtggactggagattagaactggacaaaaggcttatctgaggatgcagggctttgtggaatcgatgaaaattattctgggtggatccatggctcgggtaggagccctgagtgaatgtccattccaaggagacgactccattcacaatgcagtgaccagcgcactgcaatccattctaggggagcagaccaaggcattggtcacccagctcaccctcttcaaccagatcctagtggagcttcgggacgacatccgagaccaggtgaaggaaatgtcactcatccggaacaccatcatggagtgtcaagtgtgcggtttccacgagcagcgttcacactgcagccccagcccctgcttccgaggcgtggactgtatggaagtgtatgagtacccgggctatcgctgtgggccctgcccacctggcctgcagggcaatggcacccactgtgatgacatcaacgagtgtgctcacgctgacccctgtttcccggggtccagctgcatcaacaccatgcctggcttccactgcgaggcctgtcctccagggtacaagggcacccgagtgtctggtgtgggcatcgactatgctcgagccagcaaacaggtctgcaatgacattgatgaatgtaatgatggtaacaacggaggctgtgacccaaattccatctgcaccaacacggtggggtctttcaaatgtggtccctgccgcctgggtttcctggggaaccagagccagggctgcgttccagcaaggacctgccacagccctgctcacagcccctgccacatccacgcccactgtctctttgaacgcaatggcgctgtgtcatgccagtgtaacgtgggctgggcagggaatgggaacgtgtgtgggcctgacacagatatagacggctatccggaccaggctcttccctgcatggataacaacaagcactgcaagcaggacaattgccttttgacacccaactctgggcaagaagatgctgataacgatggtgtcggggaccagtgtgatgacgatgctgacggggatggtatcaagaatgtggaggacaattgtcgactgttccccaacaaggaccagcagaattcagacacagactcgtttggtgatgcctgcgacaactgtcccaatgttcccaacaatgaccagaaggacacggatggcaatggagaaggagatgcctgtaacaacgatgtggacggggatggcatccccaacgggttggacaattgccctaaagtacccaacccactgcagacagaccgggatgaagacggagtgggagatgcttgcgacagctgccctgaaatgagcaatcctacccagacagatgcagacagcgacctggtgggggatgtctgtgacaccaacgaagacagcgacggagacgggcaccaggacaccaaggacaactgtcctcagctgccaaatagctctcagctggactcagacaatgacgggcttggagatgagtgtgacggggacgatgacaatgacggtgtcccagattacattcctcccgggcctgataactgtcgcctggtacccaatcctaatcagaaggactcagatggcaacggtgtgggtgatgtctgtgaagatgactttgacaatgacgcagtggttgaccctctggatgtgtgcccggagagtgcaggagttacccttacagacttccgggcctatcagactgtgatcctggatcccgagggtgacgcccagatcgatccaaactgggtagtgctcaaccagggcatggaaattgttcagactatgaacagtgacccgggtcttgcagttgggtacacggcctttaatggcgtggactttgaaggcaccttccacgtgaacacagtcactgatgatgactatgcgggcttcctcttcagttaccaggacagtggccgcttctatgtggtcatgtggaaacagacggagcagacctactggcaggccacgcctttccgagcagtggcccaaccagggcttcagctcaaggcagtgacatccatatctggcccaggtgagcacctccggaatgctctgtggcatactggccacacccctgatcaggtacgactgctgtggactgacccacggaatgtgggtttgcgagacaagacatcctatagatggcggctgctccaccggccccaagttggctacattcgggtgaagctctatgagggtccccagctagtggcggattctggggtgattattgacacgtccatgcgaggggggcgtctcggcgtattctgcttctcccaagaaaacatcatttggtccaatctccagtaccgatgcaatgacacagtgcctgaggactttgagccattccggaggcagctgctccagggaagagtgtgaggaggtggccacgggacccagatcctgatcggagacctttggccattgaactctgttctggagaccctggggtctaacctacagcccctcagcctaacggatggctctctggcacccaccagggagctcagccccagaggggtggcgaccccattgtgcaggggttgggagactttcaaggggtattattactcaggttctaaccccaggaaagacaacagcacattgccataaa

SEQ ID NO: 410 - DNA, 1680 bp, Mus musculus
gctctctcttctctctgccgactcactcgctcacttgctcacctctctcaaagccatggccacctgcagccgccagttcacctcctccagctccatgaagggctcttgtggtatcggtggtggctctagccgcatgtcctccatcctggctggaggatcctgccgggctcccagcacctacgggggcatgtcggttacctcctctcgcttctcctctgggggagcctgtgggattggaggtggctatggtgggagcttcagcagcagcagttttggtggaggacttggtagtggatttggtggtcgatttgatggatttggtggtggttttggtggtggtcttggtggtggttttggtggtggtcttggtggtggtcttggcggtggtattggtgatgggctcctggtgggcagtgagaaagtgaccatgcagaacctcaatgaccgcctggccacctacctggacaaggtgcgtgccctggaagaggccaacactgaactggaggtgaagattcgggactggtaccagaggcagcggcccactgagatcaaagactacagcccctacttcaagaccatcgaggacctgaagagcaagatcctggcagccaccgtggacaatgccaatgtcctcctgcagatcgacaatgcccgcctggctgccgatgacttccggaccaagtttgagacggagcagagcctgcgcatgagcgtggaggccgacatcaatggcctgcgcagggtgctggatgagctgaccctggccagagccgacctggagatgcagattgagagcctcaaggaggagctggcctacctgaagaagaaccacgaggaggaaatggcctccatgagaggccaggtgggtggagacgtcaatgtggagatggacgccgcccctggtgtggacctgagccgcatcctgaacgagatgcgggatcagtacgagaagatggcggagaagaaccgcaaggatgctgaggaatggttcttcagcaagacagaggagctgaaccgcgaggtggccaccaacagcgagctggtgcagagcggcaagagtgagatttctgagctccggcgcaccatgcagaacctggagatcgagctgcagtcccagctcagcatgaaagcatccctggagaataacctggaggagaccaaaggccgttactgcatgcagctggcccagatccaggagatgatcggcagtgtggaggagcagctggctcagctgcgctgcgagatggagcagcagaaccaggagtacaaaatcctgctggatgtgaagacaaggctggagcaggagatcgccacctaccgccgtctgctggagggagaggacgcccacctttcatcttcccaattctcctcatcctctcaattctcctctggctctcagtcatccagagatgtgacctccaccaaccgccagatccgcaccaaggtcatggatgtgcacgatggcaaggtggtctccacccacgagcaggtcctgcgcaccaagaactaaagctgctacatgctgctcaggcttaggaggctcctgcgtggacgcagatactgctggaagagcccctgtattgtccctataggcttcactctttacttgacccttgtccttcctggcaagcaataaagcttctttttctgagttgcacaaaaaaaaaaaaaaaaaaaaaa

SEQ ID NO: 411 - DNA, 966 bp, Mus musculus
atgggcccgggaaccctcaatgattcaggaaccacagagttcctgctgctgggactgtgggccccaccttccctgcgccccctgctgtgggcctcacttcttctagcctacctcaccactgtgctgggtaatggtgccctagtgggtctgatagccttggacagacgactgcatcggcccatgtatcgcctgctgacccacctggccctgctggacacagcctatgtgagtaccacgctaccgcaggcgctggcacacatgaccatgcgcagtgcccgcctctccctggtacgttgtggcacgcagctgtacgtgggcatctccctgggcagctgcgaggccatcctcttggcagcgatggccctggaccgctgcctggctgtgtgcagaccgctgcattatgcgaccctggtgaccgccccccgctgcgcagcgctggctggagcatcctggacactgggctttgcactctctgtacccaatgcggtggctgcactacgcctgcccttctgtcctgggagggcagcggtggaccacttcttctgtgagctacctgcggtgctgaggacagcgtgtgcggacaccacagccaactacaggctggtctatggcctgggcgtgcccatcctcctggtacctttggtcctcatcctagcctcttacacctggattctggctgctgtgcgcaagttgccttctgctggaagtcgccacaaagctttgtccacctgcagctcacatttggctgtggtggggctcttctatggcacggtgagtgccatgtacctgcggcccaaagcctctagtgatcttcctgctagacaccataaactggtggcagttttctacctggtggtcacacctgtcctcaatccactcatctacagccttcgaaaccgtgaggtccacatggcagctcgctatgccctggcccggctgcgggggacgcgcattgtgttgcactaa

SEQ ID NO: 412 - DNA, 9155 bp, Mus musculus
gggaggccggcgctctgacgtggaccctggggctgcgggcgcggcgggggggtcggcagcccgggggcttcttaaacccactgccccggcccggcccgcacttcccgagcaccgctccgccccgggagagagagagagccctagccggacagcccagcagctcagcccaagaggccagcgagccccgccgcccagagcgctaacgaagtctccgagaactcggtgtccccgcgtcccgccccgacagcacccacagcccgatccccaggccgtactcccccggccccccgccgcgccaccatgatgaacaacagcaactattcggacgcctccggcctcggcctggttgacgaggcggacgagatgccgtccacggagaaggacctagcggaggacgcaccgtggaagaagatccagcagaacacattcacgcggtggtgcaacgagcatctcaagtgtgtgggcaagcgcctgaccgacctgcagcgagacctcagcgacgggctgcgcctcatcgcgctgctcgaagtgctcagccagaagcgcatgtaccgcaagttccacccgcgccccaacttccgccaaatgaagctggaaaatgtgtctgtggccctggagttcctggagcgggaacacatcaagctcgtgtccatcgacagcaaggctattgtggatggaaacctgaagctgatcctaggcctgatctggacgctgatccttcactactccatttccatgcccatgtgggaggatgaagatgatgaggatgcccgcaaacagacacccaagcagcgactgcttggctggatccagaacaaagtgccccagctgcccatcaccaactttaaccgagactggcaggacggcaaggctctgggtgccctggttgacaactgtgcccctggtctctgccctgattgggaagcctgggaccccaaccagcccgtgcagaatgccagagaggccatgcagcaagctgatgactggctcggggtgccccaggtgattgctcctgaagaaatcgtggatcccaatgtggatgaacactctgtcatgacctacctgtcccagtttcccaaggccaagctcaaacccggtgcccctgttcgctctaagcagctgaatcctaagaaagccattgcctatgggcctggcattgagccccaggggaacactgtgctgcagcctgcccacttcaccgtgcagacagtagatgctggtgtaggggaggtgctggtctacattgaggaccccgagggacacacggaggaggccaaagtggttcccaacaatgacaaagaccgcacctatgccgtctcctatgtgcccaaggttgctgggttacacaaggtgaccgtgctctttgctggccagaacatcgagcgtagtccctttgaggtgaatgtgggcatggctctcggggatgccaacaaggtatcagcccgtggccctggtctggaacctgtgggtaacgtggccaacaaacccacctactttgacatctatactgccggggctggcactggtgatgttgctgtggtgatcgtggacccacagggacgtcgggatacagtcgaggtggccctggaggacaagggtgacaacacgttccgctgcacgtacaggcccgtgatggaggggccacacaccgtgcatgtggcctttgctggtgcacccatcacccggagtcctttccctgtccatgtggcagaagcctgtaaccccaacgcctgcagagcctctgggcggggcctgcagcccaaaggtgtgcgtgtgaaagaggtggctgacttcaaggtgttcaccaagggtgctggcagcggggaactcaaggtcaccgtcaaaggtccaaagggcacagaggagccagtgaaagttcgggaggctggagatggggtgttcgagtgcgagtactacccagtggtacctgggaagtatgtggtgaccatcacctggggtggctatgccattccccgcagtccttttgaggttcaggtgagcccagaggccggagcccagaaagtgcgggcatggggtcctgggttggagactggccaggtgggcaagtcggctgacttcgtggtggaagccatcggtacagaagtgggaacgctgggcttctccatcgaggggccctcacaagccaagattgaatgtgatgacaaaggtgacggctcctgtgacgtgcggtactggcccacggagcctggggagtatgctgtgcatgtcatctgcgatgatgaagacatccgggactcgcctttcatcgcccacatccagccagccccaccagactgcttcccagacaaggtgaaagcatttggacctggcctggagcccactggctgcatagtggacaggcctgccgagttcaccattgatgcccgtgctgctggcaagggagatttgaagctctatgcccaggatgcagatggctgccccatcgacatcaaggtgatccccaacggtgacggtaccttccgctgctcctacgtgcctaccaaacccatcaagcacactatcatcgtctcctggggaggtgtcaacgtgcctaagagccccttcagggtgaatgtgggagaaggcagccatcctgagcgggtgaaggtatatggccctggagtagagaagacaggccttaaagccaatgaacccacctatttcacagtggactgcagtgaagccgggcaaggtgatgtgagtattggcatcaagtgtgctccaggcgtggtggggcctgtggaagctgacatcgactttgacatcatcaagaatgacaacgataccttcacagtcaagtacacaccccccggggccggccactacacgatcatggtgttgtttgccaaccaggagatccctgccagtcccttccacatcaaggtggacccatcccatgacgctagcaaggtcaaggctgagggtcctgggctgagccgcacaggtgtggaagtcggaaagccgactcactttaccgtgctgaccaagggagctggcaaggctaagctggacgtgcactttgctggggcagccaagggcgaggctgtgcgggactttgaaatcattgacaaccatgactattcatacactgtcaagtacacagctgtgcagcagggcaacatggcagtaacagtgacctacggtggggaccctgtccccaaaagtccctttgtggtgaatgtggcacccccactggacctcagcaaagtcaaagttcaaggcctcaacagcaaggtagctgtgggacaggaacaggcgttctcggtgaacaccagaggggctggtggtcagggacaactcgatgtgcggatgacctcaccctcccgacggcctatcccctgcaagctggagcctgggggtggagcagaagcccaggctgtccgctacatgccccctgaagagggaccttacaaggtggacatcacctacgatggtcacccagtgcctggcagcccctttgctgtggaaggtgtcctgccccctgacccctctaaggtctgcgcgtatggccctggtctcaagggcgggcttgtaggcaccccggcaccattctccattgacaccaagggggccggcacaggaggcctggggctgactgtcgagggcccctgcgaagccaagatcgagtgccaagacaatggtgacggatcttgtgcagtcagctacctgcccacggagccaggcgagtacaccatcaatatcctgtttgctgaagcccacatccctggctcgcccttcaaggccaccatccagcctgtgttcgacccaagcaaggtgagggccagtgggccaggcctggagcgtggcaaggctggagaggcagccaccttcaccgtggactgctcagaagcgggtgaggccgagctgaccatcgagatcctgtcggacgctggtgtcaaagcggaggtgctgatccaaaacaacgcggacggcacctaccacatcacctacagccctgccttccccggcacctacaccatcaccatcaagtatggcggccaccccatacccaagttccccacccgtgtccacgtgcagcctgcagttgataccagtggcatcaaggtctctgggcctggtgtggagccacatggtgtcctgcgggaggtgaccaccgagtttactgtggatgcgagatctctaacagctacaggcggcaaccatgtgacagctcgtgtcctcaacccctccggtgctaagacagatacctatgtgacagacaacggggatggcacctaccgggtgcagtacactgcctatgaagagggtgtgcatttggtagaggtgctgtatgacgaagtagctgtgcccaagagccccttccgagtgggtgtgactgagggctgtgaccccacccgagtccgggccttcgggccaggtctggaaggtggcttggtgaacaaggccaaccgcttcactgtggaaaccaggggtgctggcacaggaggccttggcctagccattgagggcccctcagaagctaagatgtcctgcaaggacaacaaggacggaagctgcaccgtggagtacatcccctttacccctggagactatgatgtcaacatcacctttgggggacagcccattccaggaagcccattccgagttcctgtgaaggatgtggtagaccctgggaaggtgaagtgctcagggccagggctagggaccggcgtcagggctcgagtacctcagaccttcacagtggactgcagtcaagctggccgggcccctctgcaggtggccgtgctgggccccacaggtgtggctgagcctgtggaggtgcgtgacaatggcgatggtacccacactgtccactacacacctgccactgatggtccctatactgtagctgtcaagtatgctgaccaggaggtgccacgaagccctttcaagatcaaagtgcttccatcccatgatgccagcaaagtgcgggccagtggccctggcctcaatgcctcgggcatccctgccagcctgcccgtggagttcaccattgatgctcgtgatgctgggcaggggcttcttaccgtgcagatcctggatcccgagggtaaacccaagaaggccaacatccgagacaatggggatggcacatatactgtgtcctacctgcccgacatgagtggtcggtacaccatcaccatcaagtacggcggcgatgagatcccttactcgcccttccgcatccatgccctgcctacaggggatgccagcaagtgccttgttacagtgtccattggaggccatggactgggtgcctgcctgggtcccagaatccagatcggagaggagactgtgatcacagtggacgccaaggcagcaggcaaggggaaggtgacctgcacagtatccacacccgatggggcagagctcgatgtggacgtggtcgagaaccatgatggcaccttcgacatctactacacagctcccgagccgggcaaatatgtcatcaccatccgctttgggggcgaacacatccccaacagccctttccacgtgctggcctgtgacccgctgcctcacgtggaggagcccgcggaaatgctgcagatgcgccagccctatgcccctcttcggcctggcacctgccccacgcactgggccacagaggagcccgtggtgcctgtggagcctctggaatccatgctgaggcctttcaacttggtcatccccttcactgtgcagaaaggggagctgacaggggaagtccggatgccttctggaaaaacagcgcgccccaacatcactgacaacaaggatggaaccatcacagtgagatacgcaccgacagagaagggcctgcaccagatggggatcaagtacgacggcaaccatatccctgggagccctctgcagttctatgtggatgccatcaacagccgccatgtcagtgcctacgggccaggcctgagccatggcatggtcaacaagcctgccaccttcacaattgtcaccaaggatgctggggaaggggggctgtcactggctgtggagggcccatccaaggcggagatcacctgcaaggacaacaaggatggcacctgtacagtgtcctacctgcccacagcacccggagactacagcatcatcgtgcgctttgacgacaagcacatcccagggagccccttcacggccaagatcacaggtgacgactcaatgagaacatcacagcttaatgtgggcacctccaccgatgtgtcactgaagatcacggagggtgacctcagccagctgacagccagcatccgtgctccttcaggcaatgaagagccatgcctgctgaagcgcctgcccaacaggcacattgggatctcctttacccccaaggaggtcggtgagcacgtggtgagcgtgcgcaagagtggcaagcacgtcaccaacagcccctttaagattttggtggggccttcggagatcggggatgccagcaaagttcgagtctggggcaaaggcctttccgagggacaaaccttccaagtggcagagttcattgtggacactcgcaatgcaggttatggaggcctggggctgagcatcgaaggccctagcaaggtggacattaactgtgaggatatggaagacggtacctgcaaagtcacctactgcccgactgaacccggcacctacatcatcaatattaagtttgctgacaagcacgtacctggaagccccttcaccgtgaaggtgactggcgagggacgcatgaaggaaagcatcactcggcgcagacaggcaccctccattgccaccattggtagcacctgtgacctcaacctcaagatcccaggaaactggtttcagatggtgtctgcccaggagcgcctgactcgcaccttcacgcggagcagtcatacgtacacccgcacagagcggacagagatcagcaagactcggggtggggagaccaagcgtgaagtccgagtggaggagtccacccaggtcggcggagaccctttccctgctgttttcggcgattttctaggccgggaacgcctgggctccttcggcagcatcacccggcagcaggaaggtgaggccagctctcaggacatgacagcccaggtgacaagtccgtctggcaagacagaagccgcagagatcgttgagggagaagacagcgcatacagtgtgcgattcgtgccccaggagatgggtccccacacagtcactgtcaagtaccgcggccaacacgtgcccggaagcccttttcagttcactgtgggtccgctaggtgaaggtggtgcccacaaggtgcgagctggaggcacagggctggagcgaggtgtagctggtgtgccagctgagtttagcatctggacccgagaagctggtgctgggggattgtccatcgctgtggaaggtcccagcaaggcagagattgcatttgaggaccgcaaagatggttcttgtggcgtctcctatgttgtccaggagccaggtgactacgaggtctccatcaagttcaatgatgagcacatcccagacagcccgttcgtggtgcccgtggcctccctctcagacgacgctcgccgcctcactgttaccagcctccaggagacagggcttaaagtgaaccagccagcatctttcgcggtgcagcttaatggggcacgtggtgtgattgatgcccgggtacacacaccctcaggagctgtggaggagtgctatgtctctgaactggacagtgataagcataccatccgcttcatcccccatgagaacggtgtccactcaattgatgtcaagttcaacggcgcccacatccctggaagtcccttcaagatccgtgttggggagcagagccaggctggggacccaggcttggtgtcagcttatgggcctgggcttgaaggaggcactacgggcgtatcatcagagtttattgtgaacacccagaatgcaggctcaggggctttgtctgtcaccattgatgggccttccaaggtgcagctggactgtcgggaatgtcccgagggccatgtagtcacttacactcccatggctcctggtaactacctcattgctatcaagtatggtggccctcagcacattgtgggcagtcccttcaaagcaaaggtcacaggtccccggttgtctggaggccacagccttcacgaaacatccacagttctggtggagacggtgaccaagtcctcctcgagccgcggtgccagttacagttccatccccaagttctcctcggatgccagcaaggtggtaacaaggggccctggtctgtcccaggcctttgtgggtcagaagaactcattcaccgtggactgcagcaaagcaggcaccaacatgatgatggtgggcgtgcatgggcccaagaccccctgcgaagaggtatatgtgaagcacatgggaaaccgggtctacaacgtcacctacactgtcaaggagaagggagactacatcctcattgtcaagtggggtgatgaaagtgtccctgggagccccttcaaggtcaatgtgccctgaatctcagaagtattgccccccagaccaggcccccacttcctgccaaactcatacccacacagatgtgccacacccctctgcacactcacagaatcagacactaaaacacctgccttaggtgtgatgtgagtggtacaacccccccccccccgtgtcacttgaggggtggggggcctttatctgtctcagatcagtgtccctcaaatgtggcccaagggcagactggggtgaggctccgggcagagactgtgaaataaggggttaaacaggggttgggggaagccttgggggtcatagtggggctgatgccagtgggcaagcactgagttggaggatctgtgtgagagagaagtcaccctcacaaaccgccgtgcctaaggactctgtcaggcccgtctggtagccacagccctagagtgaagggcttggaaaagaaagagcaatggaagacggcagacccagagcaagcagcatgtgatgtgtggactggccccgagtgatgtgctctgccctcgccaggcctcccagggaactgatttctcttactatttttttttttatggttacacagctctgccccacttgggggtcttttttacacattgtgggtcccagctgtctggggaacttttgcacatgtggaaaacaccaaataaagcaatagctggtgcgaa

SEQ ID NO: 413 - DNA, 2607 bp, Mus musculus
agaactctccatccagcttggtgattgaacatctgtctcccttactgcgggtggccagccacagtgccccggagggatctgcacaatgctccagcacactagcctggtgttactcctcgcctctatttggaccactaggcacccagtccaaggtgccgacctcgtgcaagacctttccatttctacatgcagaatcatgggcgttgcccttgtgggcagaaacaaaaacccacagatgaatttcacagaagccaacgaggcctgtaagatgctgggactgactctggccagcagggaccaggtagagtcagcgcagaaatctggctttgagacttgcagctatggatgggttggagaacagttctctgtcatccctcggattttctcaaaccccaggtgtgggaagaatggcaaaggtgtcctgatttggaatgctccctccagccaaaagttcaaagcctattgccacaactcatccgacacctgggttaactcctgcattccagaaatcgttaccacattttaccccgtgttggacactcaaacacccgcaacagagttttctgtcagcagcagcgcctacttggcttcatcccctgactccacaacacctgtttctgccaccacccgggctccacctttgacctccatggcacggaagacaaaaaagatttgtatcacggaagtttatacagaacctatcaccatggctacagaaacagaagcatttgttgcaagtggagcagcattcaagaacgaagcagctgggtttggaggtgtccccaccgccctgctggtgctggctctcctcttctttggtgctgccgctgtgctggctgtttgctacgtgaaaaggtatgtgaaggccttccctttcacaaccaagaatcaacagaaggaaatgatcgaaaccaaggttgtaaaggaagagaaggctgatgacgtcaacgctaatgaagaatcaaagaaaaccattaaaaacccagaggaggccaagagtccacccaaaactacggtgcgatgcttagaagctgaagtttagatgcaagagagtggagaaggtgcacacgaggcaagtttcatgccccgggaaccaaagaagcaagccactgtcagttcctgcagaaaaagactgcagagttcaccagaaggagccctctccttactgcagtcttctctggactctaccctctggcctccaaccttcccacagcctccctaacccttctgtggctcacagcagaccagagagtagagggagctttcaaagtaccaggtcctaaaacagctcctaagctcacactcagagacaggcttccaggttgcctgacccccatgaaaggccagagtccctgagacatggccagccccatagttcaaaatcttcccacagggaaatacaccacctggccgtgctctttggaaccaggcacatgtaaaataaggaaaggaaaacaacagaaggtcatggagagcctgggtgacttgagacttaatctctggaaagccaaaataaacagagcatgagatgggagctggggccacagatagcagccttgttggctgagactgtaaatacaggctggggctgagaagcctctcggttaattgatctgcagcacgtagacagactttcttttctttttactgttgctggtgttctctagagacaaatacacgtttataagaaacctaaaagcaggagagcccaggagctgactcagtggtaaagcacttgcccggcatgtacaaacaaggcttccagtccaatccccagaatccactgaccccacacacacaaagaaacaaacacaagtatgcatttccattttttacttgaattacaggacccatggctgagaaaataactatgttaaaaggttaaaaaaaaggagaaaagtacaaaaaagaaaaaaaaattgtcagataatctactacaaacagaacacttgagaaaccgaaatgcttggcaccgacagtgttaaagagtgcaggttatgtttgaagtctgggatgctttcacaaacataatgatatattagagggactcagtctaaatatgaagtttacttatgtttcatgcacaccttagacacttagcctggcggtaatttcagacgaaaatttaaaaataattttccacatgagataaagtctcacagtgtgacatttgcccctggggacagcatgctgacaagcagtttcaggcttggtaaaagtttagttttcagatttttgggttaaagctatgaggagctatgtacggcatgacattacataactgatattactcaacacattctcatgtatagcggagtgtgggctgaagctaatatttttttccagcttttatatccttagcttttctacttccaaactaatttttttgttgctgagaataatccattcattttctctaatacagcaactacttcaacctttaatttattattaatgtatttgaaagtgtattattacctctatgtaccaacatatacactttgtgtgcctttaacaaatacattattagctctcattcttttccagcaagaagaacctgagaggagaaaaaaaaatatttgtgccccaaacaaataaagcatttag

SEQ ID NO: 414 - DNA, 1374 bp, Mus musculus
ggcccgactcccacaaatcaccccatgtactcccatacacctcacacatacacacactctctcataactcacacactcatacacattccccacacacaagcactcccacacacacctacccctcatccaaccccccccacacacaagcactcccacacacacctacccctcggcggggagaagaggcggagaaagtccccgggagcaggaggcggtggcgccaacgacggcaaccaggcggcgaccaagagtccccggaaggcggcggcggccgctgcccgtcttaatcggctcaagaagaaggagtacgtgatggggctggagagtcgggtccggggactggcagccgagaaccaggagctgcgggccgagaatcgggagctgggcaagcgcgtgcaagcactgcaggaggagagtcgctacctacgggccgtcctggccaacgagaccggactagctcgcctgctgagccgactgagcggcgtgggactgcggctgaccacctccctcttcagagactcgcccgccggcgaccacgactacgccctgccggtggggaagcagccgccggagccgcgggaagaggacgacgcggcgggaggagtgtgtctccatgtggacaaggataaggtgtcggtggagttctgctcggcgtgcgctcggaaggcgtcgtcgtctcttaaaatgtagggtcaagtaatctgctctttatccgcgtttacccctttctcctcccttacaccatgtcaaacaccttagtgggacatcgtcaccggacgcatttcagaggcggaaaaaaaagtaatattaaatcttttaagtgttagctaaaagcatgaatgtgacactgtaaccaactcctaatgataacctgtgactattaaatctctctgacagtttcttttttaggtgatttccttcctgccaggctccgttgtaggggttacagagcagtcgttcccgcctcacaacctggtaaggatccatctcttcccgtaacgctcatgctcggctgcttaggctagtttaatgggcagacatctcaatgtgtgtgtgtgtgtgtgatatctttttctgtttgtttttctttttgaaaggtggtgggaggggaatcttaatttgggccttgtccaccctggaaacaggcttgtgctggtcattaatgtacttaagttgcttctggttgaaatagctgttaaatgtgtccccttgttcagagttgcgtgtacctagctcttctgtccccagtgtgacatggccttggatgacatcggttccaactgtacacagaaacctgctaatagagatacagtttggagacagtcaaacaggtgaagttgaatggaagttccgagttgtacaaggtgcaaattg

SEQ ID NO: 415 - DNA, 894 bp, Mus musculus
ggcagatcctttcctgtggctactgcctgccagagagctaccaacagcgagcttgcttggcatccaacatgtccgaggctggcactcctgaaggccccatcaagaagaagcggccccctgtgaaggaagaagacctgaagggggcccgagggaccctggccaagaaccaggacatcaagtctaagacataccaggtcatgcgggactacgagcaagccggctcagctgccccatctgtattcagccgcaaccgcacaggcaccgagacagtctttgagaagcccaaagagggaccagccaagagcgtgtttggctgagacatgcacattgcaccatccacccggacacaggagcctccccacgaacttttttttttttgtaatgctggaagatgcctttcctctgctgtctcttgaaccatcatgactcccacaaccctagcccttggaaacaccaataaagagtatgcccaatgtccccaaccttgggacgttgccatggccgctacctgcagaagagagggaagtgtggggacatagcatatctggtgcccttcctggactctgaggtgggacagggaataatgtgtgtgctctcagaaccactgaggtgttccaggcagagccttagccgtggagtcctggtgcggactttctgatgcgtgtaggagacagttcttcctaaatctctgttttaggctgggaagatggtgccatagctaaaagtacttgccatttctttagaggactctggttcagttcccaaatatcctcatggtagctcataaccattgaactctgccaccctcttctggcctcgcgggcattgcattacgtgtggtatgcctgtagtcaaaacactcacgtacctaaaataaaaatgaaagggaaaagt

SEQ ID NO: 416 - DNA, 408 bp, Mus musculus
atgtactacaccggcgctgagggctctgtcttcccaggatgctactggggcagctatggctaccctctgggtacagtgttggctgtggctatggtagcacctactctccagttggctatggcttggctatggctacaatggctgcggggcttacagaagatactggccatttgctctctactgatttgctgtgatcccccaggcacagttccatctcttcatgaaggctttgtgacacctccaggttccagcctcaccacccttcatcttcctttcttcatcaacctcttccaagaagctgtttttcagatcttacaactgagtctcaagcaaaggaactgaaaatctagatgatgccttactctgcctttcctggatgctctttctttaggactttttcagaagctt

SEQ ID NO: 417 - DNA, 2526 bp, Mus musculus
gagaaatcacggcagaatcatcgagaaacctgaaaaatgagacctagaatgaagtattccaactccaagatttccccggcaaagttcagcagcaccgcaggcgaagccctggtcccgccttgcaaaataagaagatcccaacagaagaccaaagaattctgccatgtctactgcatgagactccgttctggcctcaccataagaaaggagactagttattttaggaaagaacccacgaaaagatattcactaaaatcgggtaccaagcatgaagagaacttctctgcctatccacgggattctaggaagagatccttgcttggcagtatccaagcatttgctgcgtctgttgacacattgagcatccaaggaacttcacttttaacacagtctcctgcctccctgagtacatacaatgaccaatctgttagttttgttttggagaatggatgttatgtgatcaatgttgacgactctggaaaagaccaagagcaagaccaggtgctactacgctactatgagtctccctgtcctgcaagtcaatcaggcgacggtgtggatgggaagaaggtgatggtgaacatgagtcccatcaaagacacagacatctggctgcatgccaacgacaaggactactccgtggagcttcaaaggggtgacgtctcgcctccggaacaggccttcttcgtccttcacaaaaagtcctcggactttgtttcatttgaatgcaagaatcttcctggcacttacataggagtaaaagataaccagctggctctagtggaggagaaagatgagagctgcaacaatattatgtttaagctctcgaaaatctaatgcagtaaaacgcctgtgcgttctgggttgaatgacttaatgcttccaactgaagaaagggtaacagagagaaagaaagccattcttggcttacgatgttgtggaatgttattatgtagaaaacttcttttatttccttttcttcagctacatgttcaatagactcacagatatatgacttacggcgttggtaaagaaactgaaggagattcagccttgctctttccttttctctgccttgagtcctgtatgaaatcacactcacggacttcagaagagcaggcaccacagtgcatggtttgctttagagagggtccatttcaaaaaccttcataaaaacaatgcaaaacaagaaaacaaccgaacaaaaaaaccacctatttcctggttctaaacaaatgattgtaatactagagcagttagtgggaggaccagctagggggaggatcacctaggggaggaccagctagggggaggaccagctgctgcaaagactgactgtttctcacttataataaaatgccaaatgcctccgcagatgccccaggcaaccctcagatcagccctttctgtgaagagtggcgttacctgtgcttgtttccttcttaaacttccaatttttctcttttaacacatttaacatttaactttaagcaagccagcttacattaggaagtgaaagacattttagttcccacccgtgattgaaatcattgactatatctaacaagcttaaagtctcctgtaagaactgatcaggatatacactaggacatgccaatagaatgggatctcatggtgcagtctgaagccctccaactggagagacgctaacatcatccttctcgctgatttccaaggagctatgactttggatgcatgcatctgcttggatgagatgtctcggctgcttgctttccttatgcacacgttctgttcagcttcacagcagcaatgctcacggtggaatagcttagcttagcttctgccccttctttggttcttttgaccaccatatccgtaacggctctcctactccctcagctttctttctctttgctctgacgtctatatgccaacacacttattccactgtctttaccctgcactgcagaattttacatctacctactggttaccaggttgtcccctgaacaaccttcctttgtgttttactgttattaaagtagtaatatttgtattcaaccatgtagtaatattttaagccactaaaggaatagttttacttatttagacaacagcaatttctactacatttttataagcttaaaacttacatgttttaaaacttaaaacgataaagacaataacaacattgatggagtatgatatgacagttcagaaagggttagctcttatcttccagtcgaggaaacctattgtatacaatagctggaggaatgtatgatcaaagaggccgggaaccgccgtgtaggatcgtacggctgtaacaggtataattgtttcattaatttgtcacagtcttactgtagaggaatgtaaaggcggaatctgcgtcattcctctggaaaccacagtgttgactctgtgaatctgtacgatatctttaaagtagtaactacgtagtcaaatgtgttcttgacgttgttcataactttgaataaaccatttttcaaaaccacgtgtgaccacaaaaaaaaaaaaaaa

SEQ ID NO: 418 - DNA, 1134 bp, Mus musculus
tttttctctcctctgccttccctctctgccctctccccttccacttccacgctctcctttctctcttttctgctttacagtggaaaaatgtttgtgaacgcccatctgggaagccttcttttttaaaaaaaaaaaaaaaaatcagattgacttaatggctgcccctggtgctcctcatcaccccgcatacacctgcctgacaccgtaggtcttttaaaaaaaagaaaaggaaagaaaaagaaaaaaaattcacacactgagatggaattttttttaaccttttttagggtcaccccaaaatttaaaagggccattgttcatccgtggctatcatttttcacgctgccatttttgccaaaatcctgttttcggtttggtttttctcacacgcatatactccctgcgctgatttccctttgtccagaggcgtgggatgaaccatggtgtctggttgatgataacatttgagagacacgtgctgaggccccccactgtgcccggctctcccagcccacatctcctgggtctcgttgcatggttaccgtttgggagaactggacaagatggaactcgccctcctttgaagaaggggaaagcagaactggttctccacccctcccccacccacagcaccccaagaattctggaggaagtggccatgggcaagcttgaaggtcaggttgtgggtcaaggtggtcctcacaccagcctcgcccccctccccgacctccctcctgcccctcccctgagggccacacactcgaaagggttccggggactcggcctggctgttggttatggatgttcgaggaagggattcagagccacagcagcctggagccgcccgcccaggcagtggatccaagcagtgtgagctttcacatggtctgttactaggacttcttcatgggtctctcagttctatgttagaccgtgaaacatttgcatacacatcgtctttaatgtcagttttataacttttttacagttcagatattcatctatacatctgtacaggaaaagaaaagctgctattttttttttgttctttatctttgtggatttaatctatgaaactttcaggtctaccccttcttcctttctgctcactccaagaaacttcctctgcttatc

SEQ ID NO: 419 - DNA, 2769 bp, Mus musculus
gagccattccaacgtacttaggttcagcccacccctcctaggaggctgtatttcctggtctggaaactggcctcaaagctcctctttttgagttgtgttaagatcaaagagggctctgctgggaagagacagcagtggccagagacatcgtggaagccggagctaaggcacctgtcagcggtcgaccttacctggatgtgaaatcatgtgactaggacgcttgggcagacaccaactctgagcctgaggtagagcgagcagactgttcccagcaactttgccccttagacctttcgtgttatctgctctttccctgaagctgggcccaaccccacccccacagcctcaactccagccgccagctctcttttcctctgcctcttatggtcctgggagtggggataaggtgaagaatcaccagtccctgtggcagatgacaggggtcacccacacgttctatctcccctccctgggctttctcagccttccctaagagatagctggacctggagcgcctcggaatccctcggggtacctgcatgtatatactctctcctcaggagtctaataagggaggcacaggccctggggggcacagtacaagaggagaggagggtcccaggctatcgaggggaccaacaaaccacgaagtcctggggacaggcacagggcaggacccaccccctgccctggcaggtacagaggtccttggggctggagctctggactaacagtgccaggtggtgagctcagccttgcaaccctgccctcctgtgtcgggctgtcagcagagccgtttctcccaagaagatttccaggcccctctgggcaatgaagaggcctaaatttagccagcagacaaggggctggcctcgagcccagggacagttgggccttataaagcgctggcagtcaggggccccggcacgcttccgtggaggcctggacccactcgtttctccagcccagcccctgcccgtctggacagggacccccgctgcctgtggatgagccatcggacctcctccgccttcagagcggagagaagcttccgttcctcttcctcctcctcctcctcctcttcttcttcggcctcccgtgcccttccagcccaggacccacccatggagaaggctttgagcatgttttcagacgactttggcagttttatgctgccccactcggagcccctggccttcccagcccgtcccgggggccaaggaaacatcaagaccctcggggatgcctacgagtttacagtggacatgagagacttctcccctgaagacatcattgtcaccaccttcaacaaccacatcgaggtgcgggctgagaagctggcagctgatggcacagtcatgaacacctttgctcacaagtgccaactaccagaggatgtggacccaacatcggtgacctcggcccttcgagaggatggtagcctcaccatccgggcgcggcgccacccccacacagaacatgtccagcagaccttccggactgagataaaaatctgagggtctctccacccctggcctcccccttatctcctcccccactggcctgccggtgaggtcaccatgatccctgacaatgacccctcagaacatctcagcctaggccccagtcactccacacactctcaggccccaggtgggtcacccctgccccaaactagggcatccctctccatccaacgcagtccagggacctgtctgctctcacccagatagaccctccctatctaagttcacaatagaggggctgaggtaccaacctggagagcaagacgagggcagagtctaacacagagtggcggcttcaatggcatttctgcagggcaggggaccagaagccccttcctggcaaatgagaggctggccacaagcagggcttctggcctaggtagactgcctcagggaagccagagagatagccatgactgttaccttccttgtaactctcgaaacctcaaacccagggctacctgtcaccctgaggctctaacagctacatgtaccagacaaagacacctgtacctagatggggtttattaaaatgacatgaggctcctatctccagctgctggtgcatgaggccagagcccagggctcctgggtggcttcccctgcagagagggtcctctttggaagtgagaggaagaggcaggagttgtacacacacacacacacacacacacacacacacacacacacacacacacacacacacacacacacacacacgcgcgcgcgcgcgcgcgccattgtcctatgccttaaatactcattcccactggttggagcccaattcaaagcattctaagagtcacagttagcatctctgttttcatcaatggagactggcgtctctgagccagttggatgcccaggtttgtctctgaagccagcgctgcctcagcggctctcagactctcccctctgtgtactggggacacttcccccccattccacctctcctgagccacatgccctgcttcgccctaactgcagatggtggccacaagaagaaccccaaaccagatctcttctggcccccaaattcagggcaaaaacccttgtcagccttaaccctgggggacctgggctctgactcagtctctgcgtgtagaatcgggtgtaaagggggaagctcactgctaatcggggtcccaggggcctctacagtcttaggaccctgtggaggagggggtggggtggggtcgtgggagtctagtctataacctgtacacaataaaaggacaatatg

SEQ ID NO: 420 - DNA, 3019 bp, Mus musculus
ccgagtctgcgtcctgcagaagtcctgcatactttaccgcagtggacagaagatttcctctgagacttccagaatggcttctaaacacattgggtaagagctggcacctgcctgcgaggacttcatactctcagctccaccatcttcccatggcattttgactgcgctgagcccaaaggaccagctcttcacaatgagtgacgagaagaatctcggtgtgtctcaaaagttggtttcaccttcaagaagcacaagtagttgctcctccaagcaaggaagccggcaggacagctgggaagtcgtggaaggattgagaggggaaatgacttacacccaggagccgccagtgcagaaaggatttttgctgaaaaagaggaagtggcccttaaaaggctggcacaagagattcttctgcctggaaaagggaatcttgaaatatgccaagagccaagctgatattgagcgggagaagttgcatggctgcattgacgtggggctctctgtgatgtctgtgaagaagtcgtctaagtgtatcgacctagacacggaggagcacatctaccacctgaaggtgaagtcagaagaactctttgacgagtgggtgtccaagctccgtcaccacagaatgtaccggcagaatgagatcgccatgtttccccgggatgtcaatcactttttctcagggtcctctgtcacagattctgccccaggagtgttcgagtcagtttccagtaggaagcgtagcagtctatcaaagcagaattcatttccacccggaagcaatttgtcattttcttgtggtggcgacactcgagttcctttctggctacagtcttcagaggacatggaaaaatgttcaaaagacatggcacactgccatgcctacctgctggaaatgagccagctcttagaaagcatggacgtcctgcatcggacatactcggcgccagccatcaacgccatccaggtccctaagcctttttctggccctgtgagactgcactcctccaatcctaacttgtcgacgctggactttggagaagagaagtcttactcggatggttctgaagcctcgtcggagttctccaagatgcaggaggatctgtgccatgtcgcccacaaagtttacttcgctttaaggtcggctttcaatagcatatcggtggagagagagaaactgaagcagctgatggagctggacacctccccctccccctccgctcaggtcgtcgggctgaagcacgctctgtcatccgccctagcacaaaacacagatcttaaagaacgcttacgcagaatccatgcggaatctctgctcctcgacccgcccgctgttcccaagccgggggacaacctggcagaggaaaactccagggatgagggccgagccctggtgcaccagctctccaatgagagcaggctgtctatcaccgactccctttctgagttcttcgatgcccaggaagttctgctgtctcctagctcttcagaaaacgagatttctgatgatgattcatacgtcagtgacataagtgataatctgtccttagacaacctcagtaatgatttagacaatgaaagacagaccttggggcctgttctcgagagtagtggggaagccagatccaaaaggaggaccagcttgccggcaccgggtcccaacaccagtagcgttagcttgtggagcatcctgcgcaacaacattgggaaggacctgtccaaggtggccatgccggtggagctgaacgagcccctgaacacgctgcagcggctctgcgaggagctggaatacagcgagcttctggacaaggcctcgagaatccccagtcccctggagaggatggtgtacgtagcagccttcgccatctccgcatatgcatccagctacttccgagcaggcagcaagccgtttaacccggtccttggagaaacgtacgaatgcatccgacaggacaagggtttccagttttttgccgagcaggtcagccaccacccacctatctccgcctgccacgctgagtccggaaactttgttttctggcaagatgtgagatggaaaaataaattctggggtaaatccatggaaattgtcccgattggcacaacccacgtgactctgcctgcttttggagatcactttgagtggaacaaagtaacctcctgcatccacaacatcttgagcggacagcgatggatcgagcactatggcgaaattgacatcaagaacctgaatgacgactcctgccactgcaaagtgaacttcataaaggctaagtactggagcactaatgcccacgagatcgaaggcacggtgttcgaccgcagtgggaaggctgtgcaccggctgtttgggaaatggcacgagagcatctactgtggcggcgcctcctcttccacatgcgtctggagagcaaatcccatgccgaaaggctatgagcagtattatggcttcacacagtttgcactagagttaaatgaaatggatcctttgtcaaggtctttattaccacccaccgacactcggtttagaccagatcaaaggcttctagaggaaggggacatagaggaggctgaggttcagaagcagaggatcgagaagctgcagagagagcggcggagggtcttggaggagaacggtgtggagcaccagccccggtttttcaggaaatccagtgacgatgcttgggtaagcaatgggacctacctggaactgaggaaagaccttggcttttccaagttggaccatcccgtcttatggtgaaatgtaaaagagaaggagatttcctgtaactttgcccacatttgcttccggaagcagcgcacagctgtctgtatgtttaaaagatagcatctagaatgatcacttgtgcttagcgtagcattgtaagcgctgaagtatatattttcttcagtaagtctctttaaaatttcaagtgttatcatgattgtttatatgaatgtagaacacctcggtatttctttttatatatataaactatttaataaaaatgaaagattg

SEQ ID NO: 421 - DNA, 1681 bp, Mus musculus
gtggccggcaggtgagaggaggtgctgcaagactctctggtcgcagaatgaagagggttctggttctcctgctggccttagcctttgggcacgctctagagagaggccgagactatgagaaggataaagtttgcaatgaactcgccatgctggggaaagaggacttcagatctttatcactaatcctatatagcaggaagttttccagtagcacatttgagcaggtcaaccagcttgtgaaggaagttgtctccttgactgaggagtgctgtgctgagggagctgaccccacctgctacgacaccaggacctcagagctgtctgttaagtcctgtgaaagtgatgctccctttccggttcaccctggaactcctgagtgttgcaccaaggaggggctggagcggaaactctgcatggctgccctcagtcaccagccgcaggaatttcccacctacgtggaaccaacaaatgatgagatctgtgaggccttcaggagggacccaaagggatttgctgaccagtttctgtatgagtattccagcaattatggacaagcgcctctgccacttttagttgcttacaccaagaattatctctctatggttggatcctgctgtacttctgcaaacccaactgtatgctttgtgaaggagagactccagatgaagcatttgtcacttctcaccaccatgtcaaacagagtctgctcacaatatgctgcatatggaaaggaaaaatcaaggctgagccatctcataaaactagcccaaaaagtgccaactgctaacctggagaacgttctgccactagctgaagactttactgaaatcctgtccagatgttgtgagtctacctcagaggattgcatggccagtgagctgcctgagcacacaataaaaatctgtcaaaacttatccaaaaagaattctaagtttgaagagtgctgtcaagaaaacacacccatgaacatttttatgtgcacctacttcatgccagctgctgaaccacttcaattgccagctatcaagttgccaactggcaaagacctctgtggtcagagtaccacacaagccatggaccagtatacatttgaactaagcagaaggactcaagttccagaagtgttcctcagcaaagttctggagccaaccctgaaaacccttagggagtgctgtgacactcaggattctgttgcctgtttcagcactcagagtcccctgctgaagaggcaactaacttctttcatcgaaaaaggtcaagaaatgtgtgcagattattctgagaacacatttactgagtacaagaaaaaattggcagaacggctaaggacaaaaacacccaacacctctccggcagagctgaaagacatggtggagaaacactcggactttgcctctaagtgctgctctataaactcacctcctctctactgcagctcacagattgatgcagaaatgatagacaccctgcagtcctgatcagggcccgtgcactagcttggatcttgaactgaaccactctggaaaattgccactggtaacaaaatcaagcaccacagagatggccttccaagaagatcaccaagataattccatttttcttagctacaatgtttttggagaattataaaaaataaataaataaattgaaatatggtgcaaactctaaaaaaaaaaaaaaa

SEQ ID NO: 422 - DNA, 869 bp, Mus musculus
agctccaagctcactgcctgcagttcctggacacctgttaccatgtggttcctgatcctgttcccagccctgtccctaggagggattgatgctgcacctcctctccagtctcgggtggttggaggatttaactgtgagaagaattcccaaccctggcaggtggctgtgtactaccaaaaggaacacatttgtgggggtgtcctgttggaccgcaactgggttctcacagctgcccactgctatgtcgaccagtatgaggtttggctgggcaaaaacaagttattccaagaggaaccctctgctcagcaccgattggtcagcaaaagcttccctcaccctggcttcaacatgagcctcctgatgcttcaaacaacacctcctggggctgacttcagcaatgacctgatgctgctccgcctcagcaagcctgctgacatcacagatgttgtgaagcccatcgccctgcccacaaaggagcccaagccggggagcacatgcctagcctcaggctggggcagcattacacccacaagatggcaaaagtcagatgatcttcagtgtgtgttcatcacgctcctccccaatgagaactgtgccaaagtctacctacagaaagtcacagatgtcatgctgtgtgcaggagagatgggtggaggcaaagacacttgtgcgggtgactccggaggcccactgatttgtgatggtattctccaaggaaccacatcaaatggccctgaaccatgcggtaaacctggtgtaccagccatctacaccaaccttattaagttcaactcctggataaaagatactatgatgaaaaatgcctgagtgtcacattgtcccatgttcttaataaagcccaccatgaa

SEQ ID NO: 423 - DNA, 4176 bp, Mus musculus
cggcagagagctgcctgcgcatgtcaaggctagcaacacattcagctagggggtggccctggagaggggcggcttgatcacccaatcgcccagcatcggggcttcgcaggatccagagacgcgccccgcggaagggggtccccccctctacccagcctccacctctgagatcgccagtcccaccgaagctcccgcctctttccacgcctggtggacctcatgggagcccggggctgctgtgtacaagactgaagtggaacacattctgtagcccagacgacggctggagtggggacacgcccagctggagaagcctgccccgccgtagaagcccgagattctgagtctcggtggatcgaagtcgctgtccctaggggaggcgagagttccagaaaccacttacgagaaaagatgcctgccttcaacagattgcttcccctagcttctctagtgctcatctactgggtcagagtctgcttccctgtgtgtgtagaagtaccctcggagacagaagccgtgcagggcaattccatgaagctgagatgcatctcctgcatgaagagggaggaggtggaggccaccactgtagtggagtggttctacaggcctgagggcggtaaagatttccttatatatgagtatcgaaatggccaccaggaggtggagagccccttccaaggtcgtctgcagtggaatgggagcaaagacctgcaggacgtatccatcactgttctcaatgtcactctgaatgactctggcctctacacatgtaatgtgtccagggagtttgagttcgaagcacaccggccctttgtgaagaccacaagactaatacccctgcgagtcactgaagaggcgggagaagacttcacctccgtggtctcggaaatcatgatgtacatcctcctggtcttcctcaccttgtggctgtttattgagatgatctattgctacagaaaggtctctaaggccgaagaggcagctcaggaaaatgcgtctgactaccttgctatcccttcagagaacaaggagaactctgtggtacccgtggaggaataaagtggtgtgacttgagcaatctcgtccttcgggtactctacgttaatggtcacatcacaatgctctctattatatcaaacccttcagaagctgaatcactttggcctgaatattgagcaaaccaaaccccttgctcatgatagcaaaggcacaataattctctcgttccctgtttcctccgtatgtgtttggagagggttgccctggacattctcaatgagttcttctattgttggtgggtgagctgagtgctgagcaactggctatccccagttcagcaatgccagcaacatcaggaagtgccccaggtgtcccaacacatccatctttctattcaccaaccacccacccaactgtgagatttttacctgacttccggactctatcagaactcctatacatcttgaccttgcctgaactgaagagccaacatctctccatggactaaacctcactctatccttgcttccaatcaagtagctcccaactcaactagagttgtcccctgtgctccaaatgactttagataagtactggagagtagtagtctctgtgtcctgtctgcaattgggttgtccttcactgcagcaaaaggatgaatgtatattggaaggaagccctgattagtttgtttaaaagccaaagtgtggcattcactttgattcattgaagtcattcttttcctgcctcttagaacacaagagagcagcatgcccgcccctaaactttccagagacatcttctgtgtgcactggaatacattctggagctcagtgtttcgaggctatgtctccataatcccaaaggcctggaacaaacccagaacttccaagaagccaaggaagcatccaggacgatttcagtaggttttgaaagcgatataacactcccgagattggaaacacggatgagtgaattttctgggttgaaatgcctcacttcttcatttctcagtgtctgtggatcagtattagtcctcgttttacaggaggcatctgagactcacacaaggctgaacaggatattgaggggattaaactggccgagagatgagtttcatgcctccactcttacactccctaagctgaaagatgtttttgaggactcttaacaatcagcagggcagaagcatggcatttgtccagcagaggctacaggtgacatgagacagactttaggatttcacacaaagatttgtgaatctgaagcatcctccaagagacatggcacctgagggcaatagctatatggcaaaaaatgtttttagtctgaaatggacaatgaacaaagagacaaagataggtgtgtagcttctaaatacctcacctgtagatgtcatgtttgggtattggtgtttgtaaagtcccccacccctaccctcatccccacccaagagagcagggaacaagtgacaagattcttagtcaatatctcttttttaatgactgttctaagtgcaatattctttagcccctacagatagcaagggcaggaggccttatggtatataaaaagatgcaagtgagactcagtaagagagttgtcctcactctgaggagctctataagaaagacccttctccacccccatcgggctttgtatggcaaactcccttttcacccacaccgtttccttctttgtggatgccagacatccgccttgggactcccatcccactcttttttatctggtttgtttgtacatgggggtttatccagaaacacaattgcatttgcttatgggagatcatgactatgacctacaaggtatggcactcaccagccaacttaaaatcttcaccatctccatcttcttcccatccttctactttgaatcccagactagacgtgcgcagctctggagcctttcctggtgtgctactgcttactaaagggcttagaagagttctcaagggctataatcctctagaaaccccactgtttgtcttggtgctgggtatttgctgtgactgattctcaataatttactgaaggtcaaactaagctgagtctaatttcccctttattactgtctaacagctgtgaacttggttactcggttgggcctgaaagcatcttgccctgttgacttggagtgtcagctaggtgttggatcaagccccagtccctaagtggaaatactcagtgcttgctatctcaggctttcctttcaatttgtttacacattattctttggttcctccactctcaattaactgcacacccatgctttcttttgagtttctgggtttgctctagacatcaaaatagaattgcaagtagaaagggaagttttcagagcaagattatgctgagaaagatagcagtgggcttaaaagtggaaagggctaaggtgatagcccaataggtaaagtgcttgccacgccagcgggagagtctccgtatgatctctagaatccatgtgaacagccagacatacattatggcacacattggtcatcccagacctggggaggcagagacaggaagatctgagactcgctaaccaggtcaccaggccaaacttacttacttggcaagctccaggagagtgagagaccctgtctccaaaaacaaaaccaaaaaaccaacaaggtggatagtgcctgaggaatgacacccaaggttgacttctggcctccacatatacatgcacacaagttaaggcccataagcatacttacataaagatgcacacgcttgtgtctgtgtatgtatacatgtgcgtgcacacacacacacacacacacacacagagacagagagagacagagagagagacagagaccttcctctcacttgttttataaatgagaaagccctggttctgtgaattcactcagtcaatgcaaatgtatgtaaccaggaccttggtgtgcctacgcatcattctgatcatctactcacattgttcaacactctctgtgtcgagcactaggttaggctctagttagaccccttggttttaggtctgtaaaagtgtgcaagcatgtgtgtgtgtgcgcgcacatgtgtgtgtgtacactagtgcacaagcacatggttccaataaagtctctctgttcatgtcaataaagcgtctctgaagaccaaaaaaaaaaaaaaaaaaaaaaaaaaa

SEQ ID NO: 424 - DNA, 1536 bp, Mus musculus
accgggtctttccggaactcctgagggcgcaaggccttgctctctctggcccagccatggggaacgcggagggccgcaacaccaagaaggagggggacttgttggctgcgcaggcccggctcaaggacctcgaggctcttctcaactccaaggaagctgccctgagcactgctctcagtgagaagcgcacattggagggcgagctccatgacctgcgggggcaggtagccaagcttgaggcggccctgggagaggctaagaagcagcttcaggatgagatgctgaggcgagtggatgctgagaacaggctacagacgctgaaggaggagcttgacttccagaagaacatttacagcgaggaactgcgtgagaccaagcgccggcatgagacgcggcttgtggagatcgataacgggaagcagcgagagtttgagagccggctggcagatgccctgcaggagctgcgggctcagcatgaggaccaggtggaacagtataagaaggagctagaaaagacatactccgccaagctggataatgccaggcagtctgctgagaggaacagcaacctcgtgggggctgcccatgaggaactgcagcagtctcgaatccgcattgacagcctctcggcccagctcagccagctccaaaagcagttggcagccaaggaggcaaagctgcgtgacctggaggactcgctggcccgtgagcgcgataccagccggcgcctgctggctgagaaagagcgagagatggcggagatgcgggcgaggatgcagcagcagctggacgagtaccaggagctgctggacatcaagctggccctggacatggagatccatgcctatcgaaagctgctggagggcgaggaggagaggctgcgcctgtcccccagccctacctcgcagcgcagccgtggccgcgcctcctcccactcatcccagtctcagggtggaggcagcgtcaccaaaaagcgcaagctggagtcttccgagagccggagcagcttctcgcagcatgctcgcactagcgggcgtgtggcggtagaggaagtcgatgaagagggaaagttcgtgcggctgcgcaacaagtccaacgaggaccagtccatgggcaactggcagatcaggcgtcagaatggtgacgatcctttgatgacctatcgcttcccaccgaagttcaccctaaaggctgggcaggtggtgacgatctgggcttcaggagctggggccacccatagcccccctactgacttggtgtggaaggcgcagaacacctggggctgtgggagcagccttcgcaccgctctcatcaactccactggagaagaagtggccatgcgcaagctggtgcgctcactgaccatggttgaggacaatgaggatgacgacgaggatggagaagagctcctccatcaccaccgtgtgagtggcagccgccgctgaggcccagcccacaagggtagccctgccagcctagggcagctctcccacctccatgccaaagtcttttcattaaagaatgttttggaatgcc

SEQ ID NO: 425 - DNA, 2460 bp, Mus musculus
agacaacagtgaatggtgaggcccggccgtcagatcctgctgctacctaatggagtggagccttagggtggccctgcactacccaaccttggctagacgcacagcttcctccctgaactgaagcaaaagattgccaggcaagctctctcctcggacctccataggcagcaaaggaaccaggcccattccccgggaccatggttggacttcagccctccgaagtgcctcccacaacggttgtgaagttcctgggggccggcactgcggcctgttttgcggacctcctcacttttcccctggacaccgccaaggtccgtctgcagatccaaggggagaacccaggggctcagagcgtgcagtaccgcggtgtgctgggtaccatcctgactatggtgcgcacagagggtccccgcagcccctacagcggactggtcgctggcctgcaccgccagatgagttttgcctccattcgaattggcctctacgactctgtcaagcagttctacacccccaagggagcggaccactccagcgtcgccatcaggattctggcaggctgcacgacaggagccatggcagtgacctgcgcccagcccacggatgtggtgaaggtccgatttcaagccatgatacgcttgggaactggaggagagaggaaatacagagggactatggatgcctacagaaccatcgccagggaggaaggagtcaggggcctgtggaaagggacttggcccaacatcacaagaaatgccattgtcaactgtgctgagatggtgacctacgacatcatcaaggagaagttgctggagtctcacctgtttactgacaacttcccctgtcactttgtctctgcctttggagctggcttctgtgccacagtggtggcctccccggtggatgtggtaaagacccgatacatgaacgctcccctaggcaggtaccgcagccctctgcactgtatgctgaagatggtggctcaggagggacccacggccttctacaaaggatttgtgccctcctttctgcgtctgggagcttggaacgtgatgatgtttgtaacatatgagcaactgaagagggccttaatgaaagtccaggtactgcgggaatctccgttttgaacaaggcaagcaggctgcctggaacagaacaaagcgtctctgccctggggacacaggcccacacggtccagaaccctgcactgctgctgacacgagaaactgaactaaaagaggagagttttagtcctccgtgtttcgtcctaaaacacctctgttttgcactgacctgatgggaaataaattatattaatttttaaaccccttccggttggatgcctaatatttaggcaagagacaacaaagaaaaccagagtcaactcccttgaaatgtaggaataaaggatgcataataaacaggaaaggcacaggttttgagaagatcagcccacagtgttgtccttgaatcaaacaaaatggtcggaggaacccttcggcttcagcacaaagaggtgactacagccttctggtcaccagatgactccgcccctctgtaatgagtctgccaagtagactctatcaagattctggggaaaggagaaagaacacattgatactgcacaaatgagtggtgctgggcccaccgaggacactggaggatggagcgtgatctgggataacagtccttctctgtctgcctcatcagggtgttgggaagatagaaagcgaagcagacatggaagcacttcctaacaaggcctgtcatcgtcatcatctacaaatgtaagcctgaggacaatgttttaggagagattctgtccagagaagtagtttgaggaaaatgcagtttgtagtggtaaagccatgcacacctggactgcatggtaaggaccaggggtgacggaagccatggggatccggtgcctggtaacatcaaagggctgtgggggggggggcactgcctgtccatcagttcaaagcagcaggactcagatctttagggaattgttaggactggtaaaagaatttccaccttagggcaagaacgagaacagctgttcttctgccttctctctcggaggttttctcatctcagggtcgtacctgccaggttcctgaccaggttccacctgcccacacttcctcctgctctcgctgcctttggctgcagagcctttgctcctcctgttaagccttcagtcttccatctgcaaaagggagggcaaagcacaggaccaacttccaagcttaaaaatgcacatctgacaacaaaatggctcagtggggtccattcatgggacccacatggtggaaggacagaatggattcttgcaaattgtcttctgacctccatttgagcgccctatacatgtgactgtacatatgtacaaacacgataaagatggaaacacatgtaaaaacataaaaataaaaagttgtactggaaaaaaaaaaaaaa

SEQ ID NO: 426 - DNA, 12065 bp, Mus musculus
ccgcggtcctctgtgccccccgacggctggggggaggggggaagaggccctgcgcccccctccccgtcgccaactccccctggcggcagctcccatgggtgtcgctgggccgcgccatgcctaagggggcgccgcgatgggccaaggggacgagagcgagcgcatcgtgatcaacgtgggcggcacgcgccaccagacgtaccgctcgacgctgcgcacgctgcccggcacgcggcttgcctggctggcagagccggacgcccacagccacttcgactatgacccgcgtgccgacgagttcttcttcgaccgccacccgggcgtcttcgctcacatcctgaactattaccgcaccggcaagcttcactgcccggccgacgtgtgcgggccgctctacgaggaggagctggccttctggggcatcgacgagacggacgtggagccctgctgctggatgacctatcgccagcaccgagacgctgaggaggcgctggacagctttggcggtgcgcccttggacaacagcgccgacgacgcggacgccgacggccccggcgactcgggcgacggcgaggacgagctggagatgaccaagagattggcactcagtgactccccagatggccggcctggcggcttctggcgccgctggcaaccgcgcatctgggcgctgttcgaggacccctactcatcccgctacgcgcggtatgtggcctttgcctccctcttcttcatcctggtctccatcacaaccttctgtctggagactcacgagcgcttcaaccccatcgtgaacaagaccgaaatcgagaacgttcgaaacggcacccaagtgcggtactaccgggaagcagagacggaggccttcctcacctacatcgagggcgtctgcgtggtctggttcaccttcgagttcctcatgcgtgtcgtcttctgccccaacaaggtggaattcatcaagaactccctcaatatcattgactttgtggccattctccccttctacctggaggtgggcctaagcggcctgtcctcaaaagccgccaaggacgttctgggcttcctgcgcgtcgtccgcttcgtgcgcatcctgcgcatcttcaagctgacccgccacttcgtgggcctgagggtcctgggccacacgctccgtgccagcaccaacgagttcctgctgcttatcatcttcctggccctgggagtgctcatctttgccaccatgatctactacgccgagaggataggggcacagcccaatgaccccagcgccagcgaacacacacactttaaaaacatccccatcggcttctggtgggctgtggtcaccatgacgacactgggctatggagacatgtatccccagacgtggtctggaatgctggtgggagccttgtgtgctctggctggtgtgctgaccattgccatgccggtgcctgtcatcgtgaacaattttgggatgtactactctttagccatggctaagcagaaactaccaaagaaaaaaaagaagcatattccgcggccaccacagctgggatctcccaattattgtaaatctgtcgtaaactctccacaccacagtactcagagtgacacatgcccgctggcccaggaagaaattttagaaattaacagagcaggtaggaaacctctcagaggcatgtcgatctgacctttcacctccgccccctgtagcaatgattccagatccagtcagactgcttccttagttccacgggcgacccaggatcctgtgcccaactttgagttgtggagcctgggaccccagggagatgctgggcggccaaattcggaaggcaggagcttactagaggaatctcactagtggccctgggtaaggaggttgatgtggttggtctcacaagttctgaagagacccccaaggaagtttgctgaggactctcttagcagaagcctagaggctgctgctcggttggaaggagtcaggcatgagtctctgacgggctactaacccagtggtgggcagggacaaacagagtggggctgattcagagacaccatacagcctttgatttggtctttaacatgcgtgccttcaggctgtgtagactggcagagtggtccatgcaggtccggcagctgggtccctgaaaaggcattagccaggattctcagccctagcagaacctgtctctctagctgagtagattccccaccctgatgccggctggctacccagctccaggtccctgctaggagtcgcccctagccttctgtgacaagcttactcaccccatagcatgccgaatcaactcatcctctgccactactgtagagtttagcatttctctttaggactgttggagtgactctggctttcacgttgtctgtttgggttgatggtccaatgggagtttctggtgaccttctgatggaagtggctggtgagcaaaggtctagagagggggccacaccccgggcagcttagatgaaagcattatggaccagcaacaacctcccaccactgagagttgtccccacacctagcagtagggactgtagcagcagcagcagcagcaatacaagacatcccaaccacttacccacgcattcactgggagatgggggtgggggtggggggtggggtaaaacaatactagtcaccgagggatatattctcatattccatggctagtggctcattatgggactatctcagttttatgagaacctgcgcatagcacataaagttgaccatggggctctggtccgaagatgaaaacccatagtctacctctacccatggaatcccattgacttaactctgaggaggcagggatctccaaggaacagatgatcccaagaagaatggcgatactgagctcagaggtaccgggtgagtgtggggttgatgtgtgctgttccattcgtttagtctatgaaaagcaccccacgctgggtctggcaggggggctgcgcgctgactcagcttcaggtgaggacagctcccttccactcgggtggcctccctcagtggacgattgatgtcctctgctgctggtgtgctatcggattcaccctcccaacccagacatttatcctgctggctggggcagccgaaaccatgttccgaggcctgcttctttgtgcagacctctcacccattccttgccccttatttcctgagattcctgtaggtacataagcaaaatacagcttgtgttctagtttggggcagggaatacaggggctctaaagtagagataggctcctgatcaagccatgtctccattttgggaagccccaggcctaccctattgttttgagttagctagctgttttaccccaagagtcactacctgtgcaaggacagtttccccagctttggatggtctaccctctcctcaactccactgtgagccccagcaggaagtgctcagcctgagggttatcgcatgaccctccttggcccttctgactcatcttccccaacactgtgtcaggatttggtgctcaaaattggagccccaggtcagcctattgatgatcccagttcactctagccaggttcctctgcacagccagacaatgaccttatcatccatgtactgtggacacacacacacacagagctaatcctaaggacattagccctttcctcatgttgcagcagatctgcaaagcctacggattcctgtaaattttcctctgggttccttagccttgctgagccttaagcaggcctgcctgggaaataccttgccctggctccagatttcaggaatttggagatctctggtttgggcagtcttatgactagctgtctgaactcaagctctctatctctaaaacaaacaaacacacacacacacacacacacacacacacacacacacacacacacacacacacacaccactttcccttgctgtttggtgctgttctgatgttcagcctccaacccctcagctctaagattccagtcccacctttagcctcatctttcaccagaacactgctcacctcagatgctggcctgtgagaccagggatatctactgcgggagcatatgaggtccctggagcttgtcttcacccatccctggaccacaggcccctttcctctttaacctctttctccttatacacctggatgggcaagggctggaggtgagccattgagggggaagccagagagtaagaaagcagatgtgatgggtagagactaggccccatgggaatatgggagatgagatgagatcctatggggtccttcagcaagaggcagtcacacagacccccaaacagagctttctctagttctatttctaactcttgggttagggactaagagtgctgggctgggcactgcagccaggcctccagctgggtcagcagctcctaaccctcacctccacctctcagtgaagccgctgtctgtctgtctgtctgtctgtccatctgtcccagggatgttgtgatctctttctttgggctgtggcttgaatggcctcagtatttgtgggatcttgtcctgaggggctgccaagggttcaggtctcacctggccatgagctaggaggcacggggagtgattctcagggactgaggtccctggaacagctgctgtcctctcagagggggtttccttccctgcttacagtggggccaaccacttactctgggcagcttggagtgtctgctgtcccctgtcctgccatgtccattcttatgtgtgtttgctcctgtgatgagtcagacctttgtggtgtggggtcccagggttacaggtcccccacagagggatacaggtggcaggtttgtcttctttcttgcctgtgtgggtgtgcagagccaaagcacagtatcagaggtgccccactcccaccacccgtaggagctacctgctgcagcctcagtggtctttgcaggagtagcttgttttctgagcatcagaatccaaagcccctattgctgcggcccccagctgtcttctcctgggctgcagtggctgcctgggattagtgctagaccccggggtggttggaaaggtggcagaattgaggacagaattgatggggtgagacaggtggccaaagagaacccagccacaaggcagggctggcagtgtggacccagaatggagtccatactggccatgtgggcaaagggagatctgaggagagaaatgaaatcttgaaggccaggcatgggtgttcttttctgtgttgctcatattctctctctctctctctctctctctctctctctctctctctctctctctctttctccaccactaatctccctttctctccgtgttttgttgcctgagtgtgctgattcccatgcctctcacggcttgtccccctttagcctgggatgttttcccctgagtcgaagctgggcagaccccttcggggcaaacccaaggcaatgttcagcccatgtaatcccagtccagtcctgcgtgcgcctggtggcgcccgctgctggtgtgaacagtaagtacgtcagaagtgtctagaggtgccagaaaagccagcctgctgacagagggcctggtcacataggttctccttgctccaaagtttaaaaaaaaatgaccctctcacagacgttcatctcagttcatttcaaagcctggaaaccatctctgagacgctgaccatgtcgccattccatcatcgcaggcctgggggtatggtgtcccagggtcctgggctaaggaggcaggcccagctctccaaaaacaagcaggaaccttgagcaggaaagatgagcaggtgggtggggactctgaggtcttgtacctctggtctttctcacggtttggacggttggccctctttggtttttctctctctggccatccgcactggagtttggaacaggaagggaatggcctggttgctgagagaatcatcgactgcagatgaaacatcagccacttggccatagaccctttctcaaggttgaggcagaaagaaaaagcaggttccagggataccctggaaactgcccatcaccctgtcctcctagatcccagatggctgtcccttgtccctggacctcccaagagggactgccccactttcaaactctttccagtttaaggtgggagccccaggggcaggggtcgcgtagacagagactcggagccagaggagggggtggtctcaggctgtactgtctctgttgaggcagagacaggaaagagcagtcactatctgatccttctctggacaagaagagcaggctatggacatctacacaagagcatctttgccagctggagaagatgcacttggaagcctccattcttccccatgcaaggcatgtggaccccagcttccggcccccccttccccaccataccactttctcatctccccagcatcctcctcccagcctgcagaccctccatgagggagacaagagccaaatggaacgtaagggagaatatgcaggtctgtgggcacataggtgtcccacagacacaccctatatgctaggcagcccccagcttgtcacatggtgccagagtttccctaatagctggcctttctggttccgagtcaatcaggatcgaaggccctgggatcttcaaggaatgcactgtacgtgaaatgccttgccgtcttgtacgacagacttttttaagttccaaaattatgatgggaaattttttttttggatttgctttatgaataaacctgattggtccatttctcttttgactgactgcctctttgtagtgccacgctgtccacgggtggtggtcccactcacgtgcgtgccatgtgtgcgcgcacagggaaggatcactcctgtgtgtagttatatgatgtgaacaggatcacgggagagggtcaaagggagctttctttctgagagcctcccctaatgcattccccaggttggtttcttccctcaccaaagggctctcccacgaggcttctcccataggtgcagtgcttgactgggctttacactagcagtgtccccaagaaggacagagatgggggacaaagctcagtcagagccaccattgccaggtgctaaaggcctctaaacctttgctcttgagttaggagggccagggtgcttggctgtggccacattttgcccccttccaccatacatgtcgccctgagacctccttccaggctccttcttaagccactgcagaagctaagccccaaaatcccatccacccacccgaggccaccagcgtctgtcgtctcccgcacatccatttgctctgcttggccagccacactggtagaaaggacaggaatgtgagcccctcccacatccctgtccaatgatcacagcctcatgcatatgcatatatcgttgttgtgcgagctgaccaggtctcctggagtggtctgtggagggactgcttgatatgtgtgtgagcagcagtgtaggtctgcatggggacagagcagatgggatgatgtcatagggtctgtggggtgacacgggaagctaatctgcatgaatgataggatagagcaatcagacggcagggaaatatatgaccaggcctactctgtgcagggaacgtgaaatgaaagggacatgattgggtctctgtagagagggtataggtgtggtcctcttgtgtgtgtataggacagagtttcagagggctgtgaaatgaagcccaatctcagagtacagtctcagatcgggttcctgtaaggacagaacagaggtgtggccagtctagtctttctgaaacttagcttggtaaaataggatttgatgggggacagtctagaatgcatgaccaggctggtctgtaggagggatggcaaatctgagggactagaccatttccctttggggacaggagagaaggtgtgaggagcctagtctgtctgggataaagttagagaggcgccggatttggtccttctgagggcagagaagccagaggcatctgaatggtcaagttgggtcctacatggagtggtgggaggagcaagctgagtggtcagacttgggggatggatagaccaggaaccaaaggataaactcagaagccgcatggccggagtggaggggaccaggtggggtctagctgggcctgggcctggatgttgctgggaagcatcctggtgctggttagaagcagaggggtctgaaaggctgcctttctgagtgtctgtctgtctgtcttctccctgagctgtgtgtctgacccccctccccatgaatacatcatatcattctgtctcatcaacgctgccttgggccctgtgcctgaccccagcaccacacgccaggcccatcaccaattcatctttttgcaaactttgagcaaacctaggagtctcttctctctctctccctcctgcatcgtcagcagcccaccccagccttgcaccccccttccatggagcacccacttttctatcctcaggaacaagaagtcctttgtcgactgccccaccttcggcctgtcaccccctctcactaaacagttttcggtgtctcaatagcttctgcttatatgtttgaagattccaaactgaatggggaggtggcgaaggccgcgctggcgaacgaagactgcccccacatagaccaggccctcactcccgatgagggcctgccctttacccgctcgggcacccgcgagagatacggaccctgcttcctcttatcaaccggggagtacgcgtgcccacctggtggaggaatgagaaagggtatgtagaggaacttggagctctctgcattggccgggcccgccttgcgctcctgcagatgggtgggcagggcggcgggcaaggggtgctgaggggtaggtaggcacattgagggggtaatgggggattcccctggagattcgcctctagaagtcagagttctttctccaagggggatggaagcaagctggcagagagaagccaaggcccaggcagctgtaggttggtattcagctcaatggtagaaaggggcttgtccagggttgatggccacggtctgtaatcccaagccaaggggtactcaaggaggcagggtggagtctcagctccttcagatttctccagtggggcagaccatgtccaaaaggtaaagtgttctctcctagcctctagttgtggaggattactggcttggccaccatcctgtgaagtttagtctaaggttcggctatggaagaagtatcctttaaagaaaaactgcaggccagtggaaagggaggcttcacagaacggtggctttagagctgggagacaaggccactatccttgaagaggtaaagcggtgtgccagtcagaatcctgggagtggcagacagagaacttggccaagacgaggtgtgccaacaggacttgtatagctcattccatggacaaagcacattattactgccccagaggtagtcagtgcctccttgtggccagtgaaggctgtgactagcggtgttcttgcagtcaggatctggagaggtctagcatgggctgcctggggaagcgttcagaaccttccacatagggctgcaggcactggcctgggccttcctcagagcagcagactagctgggaggttcatgcatgttcctgtgcacctcacacagacacatgacagggagaagggtgggccagaggggagtcacactattgagagtcccagctggcctttgtcaactaccctagtgtcaggaatggttaaatcagacccaagggaaacattagacttcaagaatccaaggcaggtctagaagaggggaggtagcctccactaagacgagggacagtcttttgggttgcgcgcgactgcttagttatgccgatctgattcaggctggtctctgcttgtttgccctgcctgaggtcccctggacctcagtgcggtgtgccgctcctgcatggtgctgcatggcagagggctaccagccttgcggggagccccatccgtggcgtggatggggctgctgctctctttgcaactggcttattccctggtaaagcctgtagaatgcccaggagcaggggtccaccctgaagaatagggggaagcgatcttcatggctgcgccctgcccagcaaggccccataggctgcctgacccccttgtcttgaatcctggatcagtcggtgtggcctaagagggcagagtatgtgtgctctactatgcttccagaagtcgagggatgtgggacagaagcaccccatttcctagtagttctagggagtacaagccccatccataggtgacccctagtctcagaacccacccgggtttgggtgctggactctttgggaggcaccaagggtgaaggccccatccgtgtccatccagcccggctctcacggctcctgatagcaacaagaacttgctttgctctggctgattcggagccctttaggtctgcaggtgcagagcagaagtagggacttcacctgtcccccccaagagggaagagaaagaggctgctaggctggtccgctgcatgggaaacaagccagctggagaagaacctgcctgcctctgcatgcggctgttcagcctttcctcttccttccttaacaactaagtgcggagcgagcgagagcgagcgagcgagcgagcgggaggggacggcgagaagaggagctcaagtgttaattgtattctctacatacagatctttgcaaagaaagccctgtcattgctaagtatatgccgacagaggctgtgagagtgacttgaccaggcggcttggccgaggacactggtggctattaagcatctgggtggacctgcagcccctcctcaccctcggacagagtaaattcacgccatgcaggtttgccggacgagtccgagtggcccaggcattgtactaagacggacgtagctttttctacggcccatggtaactgaccgtagaggattcgcccttctttcttttcatttttttctttttttagaagttaccttttatttggggagggggggtcaaggggagccttagcatgacttgcatgaagttaaacagaaaaacgcagctaaaccaagcccaccagcccctgctgtgactgtatgaccaccctaaccatcaccaacaatggagagaaaagcaagagtcccttattttctttcagcactctttgacacatggtgtctggagtcaaactgtaccggtgctcggtagaaacctgtacatttctgggagtgggggtggggcgggggggggggtcagggaacaaggatggggctgtagagcggattgctttttgtacacaagacctagaggaaaggttccaaaacggcagtcagtcatcggtcacattgacctcaccttcattgcccaccactcacgtggaaaaccaagaactctgctctgaataggattgtggaaattcacactgccaccctcttccacctctgtctggcatgcttgtgacccaacgggcctctccccaagacccggacagcggctagtttaggttgattctctcatcttggtgtgtagctccaatgtgaccaagtttcataacaaattgttcatagttacaccatatggattttccagtgtcattctaaagccaggatgtagagtccctgcagtccagggccaccagaggggtggcctcccctccaccttcatcaaggcgagaactggcactgtatgcaatttagtacttcagagtaaaaaaataaataaagaaaataaaataaagaaaaaaaactgcatgcccaatgttatgcaaagagattcgagcatgaaataaattttgtaacatggtttctgtctagtcgaaagcagatttgtttttctgaagcgattggaggtttgcagagacccgcttctgcatctcgaataaatatagtattttcccaacagaaacagaggacagtagcttggctttggtctgattctaaaattagtgtgtgtgtgtgtgtgtgtgtgtgtgtgtgtgtgtgtgtgtgtaaagatgatatttttgaaaaacacatgcttgagttgaaaaaaatagcaacatctcgagctctcagtgcgacatttcctggaaagacagcaacctccccttcccaggccctggccctggaaataaagagctgacttttgatctg

SEQ ID NO: 427 - DNA, 695 bp, Mus musculus
aaagggagggagggagaaggcagacggagaagggtgggtattaaagggtgggaggaaggcggtgagggaggcgggggcctcagagtggaaggagggagcagaagggcggggcaagaggcccaacgaggacagactccaactctgacttcttcagcaactctcggcttgcctctcctgccctgagccagacatctggcagccatgtcactcctcctgttggtggtctctgccctccacatcctcattcttgtcttgctttttgtggccactttggacaagtcctggtggactctcccagacaaagagtccctgaacctgtggtatgactgcacgtggaacaccaccactcaaacatgggcctgcagtaacgtcagtgagaatggctggctgaaggcagtgcaggccctcatggtgctgtctctcatcctctgctgcctgtccttcatcctcttcatgttccaactctacaccatgcggcgcggagggctcttctacgctaccggcctctgccagctttgcaccagtgcagctgtgttctccggggcactcatctatgccatccacaccgaggagatcctggccaagcacccgagtgggggcagcttcggttactgcttcgccctggcctgggtggcttttccactcgctctggtcagcggcattgtctacatccacctgcggaaacgtgaatgagc

SEQ ID NO: 428 - DNA, 12021 bp, Mus musculus
atggcagctcagtgcaccccgtctattctgaccatcctggtgttgcttggcttagccagagcaggcccattctctcctcggtctaatgtgacacttccggccccacggccccctcccaagcccggtggtccttcttctcagctgtacgagcatactgtggaaggaggagagaagcaggtggtgttcacccatcgcattaacctgcccccgtcagccggctgcggctgtcccccgggctctgagcccccggtgcctgcttcagaggtgcaggccctgagggtccgcctggagatcctggaggagctggtaaaagggcttaaggagcactgcacaggaggatgctgtcccactgcggcccaagctggcacaggccagactgacgtgcgcagcctctgcagcctccacggtgtctttgacctgagccgctgcgcctgttcctgtgagcctggctggggtggacccacctgctcagaccctacggacacaaagacgcccacctcatcgccgccctccaagtcctgtcccgaagactgcaacgaccagggacgctgcgtccgaggacgctgcgtgtgcttccccggctacagtggccccagctgtagctggccctcttgccctggagattgtcaggggcgcgggcgctgcgtgaagggcgtgtgcgtgtgtcgcgcgggcttctcaggccctgactgcagccagcgctcttgccctcgcaactgcaaccagagaggacgctgcgaggaaggacgctgcgtgtgtgaccccggctactccggtgaggactgtggggtgcggagctgtcccaggggatgcagccaaagaggccgctgcgagaacggcctctgcgtgtgcaaccccggctactctggcgaggactgtggggtgcggaactgtcccaggggctgcagccagaggggtcgctgcgaggacggccgctgtgtgtgcgatcccggctatagtggcgaagattgcagcatgaggacctgcccatgggactgtggcgacggagggcgctgcgtggacggtcgctgcgtgtgctggcccgggtactcgggcgaagactgtagcacgcggacgtgcccgcgtgactgccgtggccggggccgctgcgaggacggggaatgtatctgtgacgcaggctacagtggcgacgactgcggtgtgcggagctgccccggggactgtaaccaaaggggccactgtgaggatggccgctgcgtgtgctggcccgggtatactggagcggactgtagcacgcgcgcctgcccacgggactgcaggggccgcgggcgctgcgaggatggcgtgtgcgtgtgccatgcgggctacagcggcgaggactgcggggtgcgcagctgccccggggactgtcgcggccgtgggaactgcgagagcggccgctgcgtgtgctggcctgggtacacaggccgagactgtggcacgcgtgcctgccccggtgactgtcgtggacgcgggcgctgcgtggacggccgctgcgtgtgcaatccgggcttcactggcgaggactgcgggagccgtcggtgtcctggggactgtcgcggacacggccactgcgagaacggcgtgtgcgtgtgcgctgtgggctactctggcgacgactgcagcactcgcagctgtcccagcgactgcagaggccgcggccagtgcctgaatgggctctgcgagtgcgacgaaggctactcgggtgaggactgtggcataagacggtgtccccgcgattgcagccagcacggcgtgtgtcaggatggcttgtgcatgtgccacgcaggctatgcgggcgaagactgcagcattcgcacctgcccggccgactgtcgccggcgtggccgctgtgaggacgggcgctgtgtgtgcaacccaggctacaccgggcccgcatgtgccactcgaacctgtccagctgattgtcgtggccgtgggcgctgcgtgcagggagtgtgcatgtgctacgttggctacagcggtgaggactgtggacaggaagagcctcctgctagtgcctgccctgggggctgtgggccgcgggaactgtgccgcgccggacaatgcgtgtgtgttgagggctttcgaggcccagactgtgccatccagacgtgcccaggtgactgtcgcagcaggggagagtgtatccagggcagatgcgtctgccaagaaggctacgctggggacgactgcggggaagagataccagccatccagaacatgaggatgcatcttctagaggagacaacagtccggacagagtggacacgagctcccggtcctgtggatgcctatgaaatccagtttatccccatgaccgagggggtgagtccaccattcacagctcgggtgcccagctctgcctcagcctatgaccagcgaggactggcgcctggacaggactaccaggtcactgttcgtgctctacgagggaccagctggggtcctcctgcctctaagaccatcactaccatgatcgatggtcctcaggacctccgggtggtagctgtgaccccgaccacactggatcttagctggctgcgcccccaggctgaggtggaccgatttgtggtgtcctatgtcagtgctggaaaccaaagggtgcgactggaagttccccctgaggcagacaggactcagctaaccgatctgatgcctggtgtggagtatgtggtgactgtcactgcagaaagaggccatgcagtcagctacccagcttctatcagggcgaatacagggtccttaccctctggcctcttggaggctactgatgagcctcctccctcgggcccctctacaacccaaggggcccaggcccctatcctgatcctggagcaccacccgctgggagagttgaaggtgctgggcagagacaaggcagggcgcctcagtgtggcctggactgcccagcctgacagctttgcccacttccagctgcgtatgcaggtggccgaggggccctgggctcacgaagaactgctaccaggagacgtccagcaggctctggtgcccccaccccctcccggagccccctacaagctattcctccatgggatcacccctgggggcaagatctctgttcctatcacctaccaaggcattatggacagggctcaggaacagcctgggaagccatcagtccagccacgcctgggtgaactgacagtgacaggcctgacctctgattccctgctcctgcactggactgtcccagagggggagtttgactccttcctgatccagtacaaggacaaagacgggccccaggcgatatccgtggagggaccccagcgttctacacccatctcaggcttggaaccaggacgcaagtacaaatttatcctgtatggactcatcggcaagaagaggcatggcccacttatggctgaagccaagatcttgattcagagtgaccctgacccaggatccccaccccgcctgggagagctatgggtgacagaccccactccacactcattgcacctctcctggactgttctcggaggccagttcgactccttcgtggtccagtacagagacaaggaaggccagccccgtgtggtacctgtggaggggcctgatcgctcagtggtgatctccccactggaccccaatcgcaagtacaggttcactctgtttgggattgccaataagaagcggtacgggccccttactgctgatggcactactgctgcagagacgaaagaggagtcctcagagccgccccgcctcggcgaactgactgtgactggtgtgaccccagactccctgcgcctgtcctggacagtggcccggggtcccttcgactcctttgtaatcctttacaaggatgcacagggccagccccagagtgtacccatcgaaggtgatgagaatgaggtcactgtccccggcctggagtccaacaggaagtataagatgaacctctacgggcttcgtggcaggcagcgtgtggggccggtatcagtggtggccaaaactgccccaccagatgttgtagaccagcccctcagccccccagagcccagcacagaggccccagagccccccgagaagccactcctgagagagctgatcgtgacagacaccacacccaactccctgagcctctcctggacagtctccgagggacagtttgaccagttcgtgatccagtacaagaacggggatgggcagcccaaggtggtgcgggtgccaggacacgaggaccaggtcaccatctccggcctggagccagaccacaagtataagatgaacctgtatggcatccatagtggccagcgtgtgggccccgtgtctgttgttggtgtgacagctgcagaggaagaaccccccagccccacagagcccagcacagaggcgccagaacccactgaggagccgctcctgggagagctgacagtgacaggatcgtccccagactccctgagcctctcctggaccgtcccccagggagactttgactccttcactgtccagtacaagagcagtgatgggcggccccaggtgatgcgtgtcgggggccaggagagggaggtcatcgtgagagacctggatcctgggcacaaatacaagatgaacctgtatggactccatgaggggcatcgtgtgggccctgtgtccactgtgggcacaaccgacaaacaaccagaagaaaagcccccccttgagccacgcctggaggagttgacagtgactggtgtaacccccaattctgtgagcctctcgtggatagttcctgagggacagtttgactccttcgtggtccagtaccaggacagggatgggcagccccgggaggtaccactgacagcagaacagcgtgaggtcactgtccttgacttggaccctgcaagaatatacaaaatgaacttctacgggctacacggtagacgacgtgtgggccccctctccgtgtcagcaatgacagcaccagctccagccaccgaggcctccaagctgctcccagaaccacgactgggggaactaacagtgacagatgtgaccccggactcagtgggcctcctgtggactgtccctgagggtgaattcgactccttcacggtccagtacaaggacagggatggccagccccacgtggtgtctgtggcagcagacctacgggaggtcaccatcccaggcctggagccctctcgcaagtacaagttcctgctctttggggtccaagatgggaaaagacgcagccaggtctctgtagaggcgaagacagctacccatgatgacaccagcccaggggcccctccccgccttggagagctgtgggtgacggatcctaccacggactctctgcgcctatcctggacagttcccgagggccactttgactcttttgtggtccagttcaaggacaaaagtgggcccagggtggtgccagtaaagggtcaagagcggacagccactatcacggccctggatgctggccgcaagtacagattcctcctctatgggcttctgggaaggaaacgctttggccccctcactgcagagggcataacagagcccacgaatgctgcggaccacacaaaatctcgactgggagaggaactgcgggtgactggtgtgactcaaaactccgtggacctctcctggacagtctccgagggccagtttgactcctttgtggtccagtacaaggacagggatgggcagtcccaggtggtgcctgtggacggaagccatagagaggttagagtctctggtctagacccaggtcgcaggtataagctgctactctacggcctccgagacagcaagcgtgtgggtcccctttcagtcattgctgtgaccgaccccagagaaacaacagaagcttggacagaggtccccacaacttcaactcctgcagctgtgccccgcctcggggagctgagagtggaggaagccacgcctcacagcctgcatctctcctgggtggtgactgagggagaatttaactccttcgaggtccagtacactgacagagatgggcaactcagagtggccagtacagagggtgaccagactgacattacccttactggcctggaatcgaaccacagatacctgataaccctatatggcttccatgatgggcagcctgtaggctctgctcaaattgaggccctgacagtgccgtgggaggaagaagaggaggaagaggagtccacagagccacccaccatgactcctgagcccaggccacaactgggagagctgaccgtgacagatgccacccctgactctctgagcctttcctggacagtccccgagggacagtttgaccagttcgtgatccagtacaagaacggggatgggcagcccaaggtggtgcgggtgccagggcatgaggaccaggtcaccatctctggcctggagccagaccacaagtacaagttgaacctgtatggcatccacagtggtcagcgttttggccccgtgtctactgttggggtgacagaccccaaagaggagcctactgatgcctcttccctgaaacctcgcctggaggagctgactgtgacagatgccacccctgactccctgagcctctcctggacagtccctgaggggcagtttgaccaattcgtgatccagtacaagaacggggatgggcagcccaaggtggttcgggtgccagggcatgaggaccaggtcaccatctcaggcctggagccagaccacaagtacaagatgaacctgtatggcatctacagtggccagcgtgtgggccctgtgtctgctgttggggtgacagctgcagaggaagagcctcctagccccacagagcccaggacagaggccccagagcccacagaggccccagagcccacagaggagccacgcctaggagagctgacagtgacaggatcgtccccagactccctgagcctctcctggaccattcccaagggagactttgactccttcactgtccagtacaaggacagtgatgggaggccccaggtgatacgtgtcaggggccaggagagggaggtcatcgtgagagacctggatcctgggcgcaagtacaagatgaacctgtatgggctccatgaggggcgtcgtgtgggccctgtgtccaccataggtgtgacagctccagaggaggaagctctgaccacacaggcggtgcccaccacaactcctgagccccctcctaagaagccacacctgggagagctgactgtgacagatgccacccctgactccctgagcctctcctggacagtccccgaggaacagtttgaccaatttgtgatccagtacaagaacggggatgggcagcccaaggtggtgcgggtgccagggcatgaggaccaggtcaccatctctggcctggagccagatcacaagtacaagatgaacttgtatggcatctacagtggccagcgtgtgggtcccgtgtctgttgttggagtgacagctgcagaggaagagcccccgagcccagagcccagcacagaggccccagagcccacagaggccccagaacccaccgaggagccgctcctgggagagctgacagtgacaggatcatccccagactccctgatcctctcctggaccatccccaagggagactttgactccttcactgtccagtacaaggacagtgatgggcggccccaggtgatgcgtgttggaggccaggagagggaggtcatcgtaagagacctggatcctgggcgcaagtacaagatgaacctgtatgggctccatgaggggcgtcgtgtgggtcccgtgtcgactgtgggtgtgactgaggaggaagctacgaccacacaggcagagcccatcgtgaccactgagcctcctcctaagaagccgcacctgggagtgctgactgtgaccgatgccacccctgactccctgagcctctcctggacggtcccggaggcacactttgaccaattcgtgatccagtacaagaacggggatgggcagcccaaggtggtgcgggtgccagggcatgaggaccaggtcaccatctctggcctggagccagaccacaagtacaaaatgaacctgtatggcatctacagtggccagcgtgtgggccctgtgtctgctgttggggtgacggctgcagaggaagagccccccagccccacagagcccagcacagaggccccagagtccacggaagagccactcctgggagagctgacagtgacaggatcatccccagactccctgagcctctcctggaccgtcccccagggagaatttgactccttcactgtccaatacaaggacagtgatgggcggccccaggtgatgcgtgtcgggggccaggagagggaggtcatcgtgagagacctggatcctgggcgcaagtacaagatgaacctgtatggactccatgaggggcgtcgcgtgggccccgtgtccaccgtgggcatgactgagaaggaagctctgaccacacaggtggtgcccaccacaactcctgagccccctcctaagaagccacacctgggagagctgactgtgacagatgccacgtctgattccctgagcctctcttggacagtccctgaggggcagtttgagcaattcgtgatccagtacaagaacggggatgggcagcccaaggtggtgcgggtgccagggcatgaggaccaggtcaccatctctggcctggagccagaccacaagtacaagatgaacctgtatggcatccacagtggtcagcgttttggccccgtgtctactgttggggtgacaactgcagtggaagagccccccagccccacagagcccagcatagaggccccagagcccactgaggagccactcctgggagagctgacagtgacaggatcgtccccagactctctgagcctctcctggaccgttccccagggagactttgattccttcactgtccagtacaaggacagtgatgggcggccccaggtgatgcgtgtcgggggccaggagagggaggtcatcgtgagagacctggatcctgggcgcaagtacaagatgaacctgtatgggctccatgaggggcgtcgtgtgggtcccgtgtcgactgtgggtgtgactgcctctctgaccacagagccccccatagagccccgcctgggagagctggctgcagtagaagtgacttccagtacagtgcacctgtcctggactgtggcccagggccccttcgactccttcctggtccagtacaaggacacacaggggcagccccagatggtgcctgtgagtggagacctgggtgaggtcaccgtctcaggtttggagccagcccgaaagtacaagtttctactctttggactcaaggatgggaagcgccatggccctgtctccacagaagcaaagactgtctctgatgcaaagctgcttcctcgtcttggggagctcaccgtgacagacacgacccaaaactccgtgggtctctcctggactgttcctgagggtgaattcgactctttcttagtccagtacaagaacaggggagggcaggtccaggtcgtgcctgcagcagcagaccaacgtgaggtcaccatctccagcctggagcccaatagaaaatacaggttcctgctcttcggcctcataggcctcaaacggctggggcctgtctccgtggagggcaccacggctcccgtggagaagacaccacagccccgcctcggtgaactgtcagtgacagaggagacctctgactccatgcacctctcttggtctgtggcccagggtccctttgactccttcctggtccagtacaaggacagggatgggcagctccagacggtgtccttggctgcagaccagcgagaggtcaccatagagggtctacagccaggcaggaaatacaagttcctgctctatgggctcactggagggaagcgcctgggacccatctctgccttgggagtgacagcctcagaagttgacatatcagccccagaccacactgagccccctcatgctcccggcctggggacgctggcagtgacagaggcaaccccagactccctgcgactctcctgggctgtggctcgtggcccctttgactcctttgtggtccagtaccaggacacagagaatgaaacccaggccctgcttgttgatggagaccaggacaaagtcctcatctcaggcctggaacccaaaacttcctacaagttcttcctctatggcctccgtgaagggacacgccacggacctgtgtctgtagagggcaccacagatccagttcctgctggtcagggcccaggggaccccgggccccgcctgtcccagctctcagtttcagatgtgaccaccagttctctgcggctaaactgggaagccccgcttggggcctttgactctttcctgctacgctttggggtccccctactgagtaccctggagcagaatcctcgcactctgcaacagcgagagcttatggtgccaggcgtgcggcgatccgccatgctccgggacctgcgtcctgggaccctgtatagccttactctgtatgggctgcgtgggccacacaaggcagacagcatccagggcactgcccgcacactcagcccagttctggagagcccccgggacctgcaattcagcgacatcggggaaacatcagccaaagtcaaatgggtgccgccaacgtccagggtggacagcttcaaaatctcctaccagctagcagatggaggagagccacaaagtgtgcaggtggatggccggacccagacccagatcctccaagggctgattccagacactcgctatgaggtgactgtggtctccgtccgtggctttgaggaaagcgagcctctcacaggcttcctcaccacagtgcctgatggtcccacccagctacgggcattgaacttgactgacggatctgcccttctacactggaaacccccccacaaaccagtggacaaatatgacgtcgaggtcgaatcccctggggccccaccccttcaggcctcagcacctggcagcgctgtggactacccactgactgacctggcactcgacaccaattacacagccaccgtgcgtggtctccggggtcctaacttcacctccccagccagcataaccttcaccacagggttaaagcccccccaggacttggaggccaaggaagtgactcctcgcacggccctgctcacttggactgagcctgaagtcccacccacaggctacctgctcagctttgacacccctggaggacagattcaggaaatcctgcttccagcaggaaccacctcgcacaggcttctgcgcctcttcccctccaccttctacagtgcccagctgcgggccatctggggcgagagccttacacctcccgtgctcacttcctttactactggtgggctgcggatccccttcccccgggactgtggggaggagctgaagaatgggcccagtgcctcaaagaccaccaccatcttcctcaatggcaaccgtgagcggcctttggatgtgttctgtgacatggagactgatggaggtggttggctggtgttccagcgccgcatggatggacagacggacttctggagagactgggaggagtacgcccatggttttgggaacatttccggggaattctggctgggcaacgaggccctgcacagcctaacacaggctggagactattctctgcgtgtggacctgcgggccggaaaggaagccgtgttcgcccagtatgacttcttccgtgtagactcagcaaaggagaactaccgcctacaccttgagggctaccatgggactgcaggcgactctatgagctaccacagtggcagtgtcttttctgcccgtgatcgagaccccaacaacttgctcatctcttgcgctgtctcttatcgtggggcttggtggtacaggaactgtcactacgccaacctcaatgggctctatgggagcacagtggatcaccagggagtgagctggtaccactggaagggcttcgagttctctgtgcccttcacggaaatgaagctgcgacccagaaacttccaggtccccaccaggggcacctga

SEQ ID NO: 429 - DNA, 990 bp, Mus musculus
gatattgcaggaaagcgggctagggtgtgacgctgctttctcgttcagaatgtcatacccaggctatccccccaccggctacccgcctttccctggatatcctcctgcaggtcaggagtcatctttccccactgcgggtcagtacccgtaccctagtggctttccaccaatgggaggaggtgcttacccaccagcaccaagtggtgggtatccaggagctggaggctaccccgcacctggaggttatccagcccctgggggctatcctggagccctaagtccagggggtcctccagcctatcctggaggtaagttaggacttgagatttgctgaagtgttgtgttttatcccccccttaccctcagcgttatttcctgtattgtgagagttcagagttactcttaagttagccatggagagctaaaacttaggtagtaagctggggtgatgaagattcttaagagagagagagctgggagactaaaatattctcctgtgatcaggagctgtaaagttcttgataatgaaaggcctgtgtaaatcactacttgattattattgatcttaactgcttgagagggaccggagtggtggttctcaaccttcctaatgctgctatctctaatacagttcctcatgttgtggtgactcccccaaccataaaattatttttgttgctacttcataactctaattttgctactgttaggaatcgtaatgtaaatatttttagtgatacaggtttgccaaagggttctcgacccacaggttgagaatgtctgggctggcgcagtggccttagtgggtaaaagcagtgactgcttccagaggacctggcttaggttccagcagccacatagcagctcacagctgtctgtgccactatttccagaggctctgacaccctctttcagcctcctagagcattgcatgagtatagtgcattgatgtacccacaaaacacatgtatacataaaataacgaaatcc

SEQ ID NO: 430 - DNA, 2059 bp, Mus musculus
tccagacaccttgcaggagaactttccagaagaaacctcacccagcctccacactgctgtccttctctgcacgctgctgcagctgtggtcccaagatgccagctctccatctgctgtttctggcctgcttggtgtggggaatgggggccaggacagcacagttccgaaaggccaatgatcggagtggccgatgccagtacaccttcactgtggccagccccaatgaatctagctgcccaagggaggaccaggccatgtcagccatccaagaccttcagagagacagcagcatccagcatgcagacctagagtccaccaaggcccgggtcagatccctggagagtctcctccaccagatgaccttgggccgagttactgggacccaggaggcccaagaggggctgcagggccagttgggtgccctgaggagagaacgggaccagctggagacccaaaccagggatctggaggcagcctataacaatctccttcgagataagtcggctttagaggaagagaagaggcagctggaacaagagaatgaagatttggccaggaggctagaaagcagcagcgaggaggtagcaaggctgcggaggggccagtgtccttccacccagtacccctctcaggacatgctgccaggctccagggaagtctctcagtggaatttggacacgttggccttccaggaattgaagtcagagttaactgaggttcctgcttcccaaatcttgaaggaaaatccatctggccgacccaggagcaaagaaggagacaaaggatgtggagcgctagtctgggtaggagagccagtcaccctgaggacagctgaaacaatcgctggcaagtatggagtgtggatgagagaccccaagcccacccacccctacacccaggaaagcacatggaggattgacacggttggcacagagatccgccaggtgtttgagtacagtcagataagccagttcgagcagggctatccttccaaggtccatgtgctccctcgggcactggagagcacgggtgctgtggtgtatgcggggagcctctatttccagggggctgagtccagaactgtggtcaggtatgagctagacacggagaccgtgaaggcagagaaggaaattcctggagctggctaccacggacacttcccgtacgcgtggggtggctacacagacattgacttagctgtggatgagagcggcctctgggtcatctacagcacggaggaagccaagggggccatagtcctctccaaattgaacccagcgaacctggaacttgagcgtacctgggagactaacatccgtaagcagtctgtggccaatgcctttgttatctgtggcatcttgtacacggtgagcagctactcttcagcccatgcaaccgtcaactttgcctacgacactaaaacggggaccagtaagaccctgaccatcccattcacgaatcgctacaagtacagcagtatgattgactacaaccccctggagaggaagctgtttgcctgggacaacttcaacatggtcacctatgatatcaagctcttggagatgtgaggagcctctctctatgcctaccagcaaaggccagaaaaggtgaagttccgggctcccgggtgaagcagctgtcagcagaggcagccagatgcatggagtttctcctcctgctcaagattttgtttatccgggtcaatgtacagctcccctctgactgacacgtcctccaggcttgtacagtcgcatagactctgttctcttctgtcagctttcaaagggctgttcctcttttaaaaatcacatagtgtagcagtccagaggaaaaactagaagtaaggttgtttcttcatgaaaccattgcttttgcacgctgttatggttaccataagccttgcgaggcagcggcggttctgcggagcgaccgctcctgtggttagaactgctcctgccgaaggtgtatttactccagggggcttctagtgctacagatacagcatgtggttgggtggtacgtaaaccctttgccctgtgaaataaagttatcttacatg

SEQ ID NO: 431 - DNA, 1483 bp, Mus musculus
gagccacgcttcctatccgaaaagagcctagcgaacagattctcaacagcaggatgtgggtgttcaagtttctgctgctacccatggtgagctttgctctgtctccggaggaaatgctggacacccagtgggagctatggaagaagactcaccagaagcagtataacagcaaggtggatgaaatctctcggcgtttaatttgggagaaaaacctgaagcaaatctctgcccataacctggaggcctctcttggtgtccatacatatgaactggccatgaaccacttgggagacatgaccagtgaagaagtggttcagaagatgacgggactcagaatacctccctctcgatcctacagtaatgacactctctataccccagagtgggaaggcagggtcccagactccatcgactatcgaaagaaaggatacgttactccagtcaagaaccagggccagtgtggttcctgttgggctttcagctctgccggggccctggagggccaactcaagaagaaaactggtaaactcttagctctgagtccccagaatcttgtggactgtgtgactgagaattatggctgtggaggcggctatatgaccactgccttccaatacgtgcagcagaacggaggcattgactctgaagatgcttacccatatgtgggccaggatgaaagttgtatgtataacgccacggcaaaggcagctaaatgcagagggtacagagagattcctgtggggaacgagaaagccctgaagagagcagtggcgcgggtaggacccatctctgtgtccatcgatgcaagcttggcatctttccagttttacagcagaggtgtgtactatgatgaaaattgtgaccgtgataatgtgaaccatgcagtgttggtggtgggctatggcacccagaagggaagcaagcactggataattaaaaacagctggggagagagctggggaaacaaaggatatgctctcttggctcggaataagaacaacgcctgcggcattaccaacatggccagcttccccaagatgtgattccagccagccagcccatctcttctcagattccttccttcatggtgcaagatattggtggctttggaagggagtgggcatggcgctcctgagagggacgcagcgatgctaactaagattgtttcatttctcctctcgttggtgcttccagtgacaactctacttcccttctctctgcccagggcccttttctttgtggacacaacagggcatttttctgagagttgtggactctgtgctggtagacattggagtcctccagcaggctggaggactaaggtgaccttcccgagcccctgtcttctgtatacaccagtgaacatttcagtcttccactgagatgcacaaatctattcgtgattctttgacaaatttacatgatattaaaaaaagtgtttttccttctttgtatttgaaataaagtatctcatttacaattt

SEQ ID NO: 432 - DNA, 1249 bp, Mus musculus
ccacgcgtccgctgggcttaacgggtcctccctgcccgagcaagaggaagggacgctcacctttgagctgctccacagcgccgcctctgcactggcactacctagcccaggtggctctgcaggagtccgaagtcgcgggtttcgtgcccgcatcaggcaacagtgccactgttgtcttcagggctgagtccttttgttcttgcactcacgcctctctgccctccaagccaggatggtgaacccgacaacttccgaagtgcaacccaccatgggggtcaagatcttctcagccggagtttcagcttgcctggcagatatcatcaccttcccgctggacactgccaaagtccgccttcagatccaaggtgaaggccaggcttccagtaccattaggtataaaggtgtcctagggaccatcaccaccctggcaaaaacagaaggattgccgaaactgtacagcggtctgcctgcgggcattcagaggcaaatcagctttgcctcactcaggattggcctctacgactcagtccaagagtacttctcttcagggagagaaacacctgcctctctcggaaacaagatctcagccggcttaatgactggaggtgtggcagtgttcattgggcagcctacagaggtcgtgaaggtcagaatgcaagcccagagccatctgcatgggatcaaaccccgctacacggggacctacaatgcttacagagttatagccaccacagaaagcttgtcaacactttggaaagggacgacccctaatctaatgagaaatgtcatcatcaattgtacagagctggtaacatatgacctcatgaagggggcccttgtaaacaacaaaatactggcagatgacgtcccctgccatttactgtcagctcttgttgccgggttttgcaccacactcctggcctctccagtggatgtggtaaaaacaagattcatcaactctctgccaggacagtacccaagcgtaccaagctgtgcgatgtccatgtacaccaaggaaggaccgacggcctttttcaaagggtttgtggcttcttttctgcgactcgggtcctggaacgtcatcatgtttgtgtgctttgaacagctgaaaaaagagctgatgaagtccagacagacagtggattgtaccacataagcaacttggaggaagagatactgaacatcattgggcttctatgctgggagaccacgaataaaaccaaccaaagaaatcaaaaaaaaaaaaaaa

SEQ ID NO: 433 - DNA, 2102 bp, Mus musculus
ctaaagagaacaagacggagaagagagaatccaggaggacccacagccatgagacaggacatgccaaagccctcagaggcagcgcgttgctgctctggcctggccaggcgagcactcacgatcatctttgccctgctcatcctgggcctcatgacctgggcctacgccgcaggcgttcctctggcttcagatcgctatggactcctggcctttggcctctatggggcattcctcagcgcacacctagtggcacagagcctcttcgcttacctggagcaccgaagggtggcagcggctgcgcggcgctccttggcgaaggggcccctggatgcggccactgcacgcagcgtggcactcaccatctcagcctaccaagaggatcccgcttacctgcgccagtgcttgacctccgcgcgcgccttgctgtacccgcacacgaggttacgcgtgctcatggtggtggacggcaaccgcgctgaggatctgtacatggtggacatgttccgagaagtcttcgccgatgaggaccccgccacttatgtgtgggatggcaactaccatcagccctgggaaccagcggaggctacgggcgctgtcggtgaaggtgcctaccgggaggtggaggcggaggaccccgggcggttggcggtggaggcgctggtgagaacacgcaggtgcgtgtgcgtggctcagcgttggggcggcaaacgtgaggtcatgtacacagctttcaaggcactgggcgactccgtggactacgtgcaggtctgtgactcagacacaagactagaccccatggcactgctggagcttgtgcgagtgttggatgaagacccccgggtaggggctgttggaggggatgtgaggatccttaaccctctggactcctgggtcagcttcttgagcagtcttcgatactgggtagccttcaatgtggaacgagcttgtcagagctacttccactgtgtgtcctgcatcagtggtcctctgggtctatacagaaacaatctcctgcagcagttcttggaggcctggtacaaccaaaagttcctgggcacccactgcacatttggggatgacaggcacctcaccaaccgaatgcttagcatgggctatgctaccaagtatacctcgcgctccagatgctactcggagacgccctcctccttccttcgttggttgagccaacagacccgctggtccaaatcttacttccgagagtggctatacaatgctctgtggtggcatcgccaccacgcatggatgacctatgaagcggtggtctcgggcctcttccctttcttcgtggctgccacggtgttgaggctcttctatgcagggcgcccgtgggctctgctctgggtgctgctctgtgtgcagggcgtagcactggcaaaggcagcctttgcagcctggctgcgtggctgcgtgcgcatggtgctgctgtcactctatgcaccactctacatgtgcggcctcctgcctgccaaattcctagcgttggttaccatgaatcaaagtggttggggtacctcgggccggaagaaactggctgctaactatgtccccgtgttgcccctggcactctgggctctactgctgcttggaggcctggcccgcagtgtggcccaggaggccagagctgactggagtggcccatcccgagcagctgaagcctaccaccttgctgctggggctggtgcctatgtggcctactgggtggtaatgttaactatctactgggtaggtgtgaggaggctgtgcagacgtcggagcggtggttaccgtgtccaagtatgagtccgggcatgaagatgcagctgagggctcttaaaggaggagtccttgtgaggcaccccctggagtcatggctttctggggactcagtttaccttctctttgaaatgagggagttatttaagattcttcaatatggactgtattggaactcagatctaggtctctggggaggggtaatttattgatcagggagtgggattgtaggaccagggccagaacgtctccattttctccctgttgctatttaatgtttgtactgtaagattatataataaattttttatttattttcttctttagag

SEQ ID NO: 434 - DNA, 2961 bp, Mus musculus
agccgggctccgcggatccgctccccaagctccgggtctcggagcagagaaacgctccgagtttcggggtcctccctgcgcctggcgcccagaacttcccggagcgcggcccagaccggggtagagggggaggggaccaagcgtcctggccgcgggaaggcgggatgccagagctgcgaagtgctacgcgccgctgagccgggaaccgaggagccgccggccgcacgactgtctgcaggcgcctagcaccatgcacccccggcgccgcgcgctcctgcagcttcgccgcgtccccccggaacggcactgagcgcctccaaccgtctaccggacccggacctgcgtcgccgcgcttctcagggagccccggccgcggtgccggagcgaacacccgcctttaccagccgcggggccgccggcatggatggatgaggacgcccatgccagaagtgcgcggaactcggacaaacttttccagcggccccgcggccgccacccgagcctcgtctccgctccgcaccgcgtccggcggccgctgctgcccgcgatgctagccgcgctgctgggcggcgccggggcccgcacggggaccttgccgggcgccttgctgtgcctgatggcgctgctgcagctgctgtgctcggcaccgcggggctcggggctagcgcacggccgccgcctcatctgctggcaggcgctgctgcagtgtcagggcgagcccgactgcagctacgcctacagccagtacgccgaggcttgtgcgccggtgctagcgcagcgcggcggggctgatgctccggggcccgccggcgccttccccgcctcggccgcgtcctcgccgcgctggcgctgcccgagccactgcatctcggcgcttatccagctcaaccacacgcgccgcgggcccgcgctggaggactgcgactgcgcgcaggacgaacactgcaggtccaccaagcgcgccatcgagccctgtctgccgcgcaccagcagcgtgggcccgggcgcgggagcgggctcggtcatgggctgcactgaggcccggcggcgctgcgaccgggacagccgctgcaacctggcgctcagccgctacctggcctactgcggcaagcttttcaacgggctgcgctgcacagacgagtgccgcgcggtcatcgaggacatgctggccgtgcccaaggcggcgctgctcaacgactgcgtgtgcgatgggctggagcggcccatctgcgaatcggtcaaagagaacatggcccgcctgtgcttcggcccagatgcgagcaacggtccgggcagcagcggctcggacgggggcctggacgactactacgacgaagaatatgacgacgagcagcgcgctggggccgcgggcggcgagcaacccctggacgacgacgacggccttgcgcgcccgggcggcggcgctgctgcggcgggcggccgcggagacttgccccacggtcccgggcgcaggagcagcagcagcggcagtggaggccactgggcgaatcgaagcgcctggaccccgtttgcctgtttgctgctgctgttgctcctgctgctcgggtcacacttgtagctcctgcgcccctgctgcaggctgctccaggccggtatgcacgacccagctggttcccgagcagggcacctgtggctcggagaccggagatggtcgggaacactgacccacactcttcctgggtggacagggcccagctcgtaccgcagccaacatgttcggccctcttctgtgcggttttccaggctgcagagataaccggctgatctatactgccagctctaatctgcagaattcgggacaccctgcaaaagcaaaggaggcctagactcagagtgctgaacggtgggggtctttcaagttccaatggacttggagaagggatgttgagggaattaggtttgcaaaggggccgggtttttatttgtctgtttgttttgtttttaaactgttttccggtgagggaacacatagtactggtaacgacttaaattgcttgtgaccactgagaaacacagcaatcgtaagtaaatagaaaagttccccttaccgattcattcctgtgctcttggtgtatctatccatcggtaatgctcagtgtggagctggcgattgcctttgggggggggaggggcttccccgaaattacaactgcattatattcctaacccttcacctttaattttcctgccaccattctgatccctctgcaccacgtgtcttagaattaaggatccaaaagaagaaaaaaagttaccatggtgttgaacaatgcatgttttttatcctaaagctcggtactgccatctaggaaaacctctatgatgtttgttctgttgtcctttttttttttttccctccaccaagaaattctaaatttgaatatgcagagattgaatattacctctgcccctatcagggtcttccaccctggtacgtcgtatataaactgtattaaaactggggtttcttaccagttgctgtactttgtatatagaattttttataaattgtatgcttcagaaaataatttatttttaaaaaaagaaattaaaagttttaaatctgcatcattgttgtatctcccctatccaagaaatgtatagaatacattggtcatgaggaatccactcctgcagcccatccaagaaatgtatagaatacattgctcaccaggaacccgctcccgcagcccattttgaaatgtgccctgtgtagaagaatgtacagtgtattttacagatttgaagtaacgttcttattttcaagagaatttatggacattgtagaaatgtataaatgcatttccaaactgccttaaacattgtatttttatagacatcatttttttaaatcccgtgtttaaaaaaaaaactatgactttgtgtatttttggttgttttattaaaaatgcacacaccagtaaagagtttaaacagtga

SEQ ID NO: 435 - DNA, 4504 bp, Mus musculus
cctcccgccaccatgaaccactctccgctcaagaccgcgctggcgtacgaatgcttccaggaccaggacaactccacgctggctttgccctctgaccaaaagatgaagaccggcacgtcgggcaggcagcgcgtgcaggagcaagtgatgatgaccgtcaaacggcagaagtccaagtcttcccagtcgtccaccttgagtcactccaaccgaggttccatgtatgatgggctggctgacaattacaacaactacggcaccacgagcagaagcagctacttctccaagttccaggcagggaatggctcgtggggatatccgatctacaatgggaccctcaagcgggagcccgacaacagacgcttcagctcctatagccagatggagaactggagccggcactatccccgaggcagctgtgccaccccgggcgctggcagtgacatctgcttcatgcagaaaatcaaggcaagccgcagtgagcctgacctctactgtgacccaaggggcacactgcgcaagggcaccctgggcagcaagggccacaagaccacccagaaccgatgcagcttctacagcacttgcagtggtcagaaggctgtcaagaagtgtcccgtgcggccgccctcctgcacctccaagcaagacccggtgtatgtgccgcctatctcctgcaacaaggacctgtccttcggccactcgagggccagttccaagatctgcagtgaggacattgagtgtagtgggctgaccatccccaaggctgtgcagtacctgtgctcccaggatgagaagtaccaggccatcggagcctattacatccagcacacctgcttccaggatgaatctgccaagcaacaggtctatcagctggggggcatctgcaagctggtggacctcctccgcagccccaatcagaatgtccagcaggctgctgccggggccctgcgcaacctggtgttcaggagcacccccaacaagctggagaccaggaggcagaacggaatccgtgaagctgtcagcctcctgaggagaagcgggagcacggagatccaaaaacagctgactgggctcctctggaacctgtcttccactgatgagctgaaggaggagctggtggccgacgccctgcctgttctgactgaccgggtcatcattcctttctctggctggtgtgatggtaacagcaacatgtcccgggaagtagtggaccctgaggtcttcttcaatgctacaggctgcttgaggaacctgagttcagctgatgctggccgccagactatgcggaactactctgggctcattgactccctcatggcctatgtccagaactgcgtggctgccagccgctgcgatgacaagtctgtggagaactgcatgtgtatcctgcataacctctcctaccgcctggacgccgaggtgcccacccgctaccgccagctggagtacaatacccgcaatgcctacaccgagaagtcctccactggctgcttcagcaacaggggtgacaagatgatgaacaataactatgactgcccacttccggaggaagagaccaaccccaagggcagcagctggctgtaccactcagatgccatccggacctacctgaacctcatgggaaagagcaagaaagatgctaccttggaggcctgtgctggggccctgcaaaacctgacagccagcaaggggctgatgtccaatggtatgagtcagttaattggaataaaggaaaagggcctgccacaaatcgcccgtctcctgcaatctggcaattcggatgtggtgcggtccggagcctctctgctgagcaacatgtctcgccaccctgtgctgcacagagtgatgggaaaccaggtgttcccagaggtaaccagactcctcactagccacaccggcaataccagcaactctgaagatatcttgtcctcagcctgctacactgtgaggaacctgatgacctcacagcctcagatggccaagcagtacttctccaacagcatgctcaacaatgtcttcaacttgtgccgcaacactgcctcctcacctaaggctgcagaggctgcccggctactcctgtctgacatgtgggccagcaaggagctgcagagtgtcctcaggcagcaaggtttcgataggaatatgatgggaaacatagctggggccaacaacctcagaaacttcacctcccggttctaagaagagactgcccaagcaagttcaacttgcagaaagacacgacccagctgagaagacctcaggccttgaagatgggttacctgctccatcctgcgtggtatttggagacgttcagatgcaaccaagagcagcctgaaaactgtggatgatggaaataatttttgattcttttttttccttaggggaactggcaggctatacggttggggaggttgggtgggggggctttcttgagttaaaggggcttacatctgatgtcaatacttccttctctgagaaacagtatatatatataatgtgtataatgtaagtatgtgtgtgtggtgtgcctgtgtggtgtgttcacgcatgtgttcctgtgtgtgtgtgtgtgtgtgtgtgtgcctaaaagcataaccaacgaggagaaacaggctgggtgtgacgatcctttgcagttcacaggcagcacaggggactctccgtgtctccctttatagacatgtgggctgcacccacatgaaagctttagccagcagagccccagacttcagacagcctgcaagcagctattggtggagaaaggaagtaagaagatcacctgaagccagaactgtggggatgtgctcactcatctcctcaaggggatagggtaggaacagatgggcactgggcactgcctgctcaggcttctcagagaacagagaggaagactggaaattagttgcaatgcacctcagacccagcttgctgagcgtcaggtgagggagttcccagaggctgaaggaagggaatttgggtggatagaccaggtaaaggaagtgtcctgttaaggcatcaactagcccacattccagccatcagcctctttcttcatgaactctagctgttctgtctgccctctgtctctgtgaaacaaaactgcctagtggggtagaggcagccaaccccaggaccccagacttcacactgcagacagaagtaccaaaagaacatctgagaaccccatgagtgagcctgtctatgtgaagccccctaggacaaatgactgatggacagagctgagccttcccccagagccttcatgtctaggctattgcttctccactggtgtggttagtgctgggtagacatgaatgataagggccatacctctctcaaggagggtatagaatgctccttggcccaaccctcttcttaccccagcagtaagaccgaaaaattcctctatggctcagggtggcctagtaaacgatctgtccattgaggattgaggaggtcagctacgtgaggacattgttcctgagaggtgtcctaagccatctacccggtgtgctctggcactgtgagtctgcagcatccttccctgtttggcttgtgtgggattctgcctcctacctcacctcctctctgataccagcgtgggatgctgtcccaccacactgtccttgggtaggcttcttgtgatctcctttgccagtcactgggatccagaacaatctacttcttcaagcatgccattgtcacactactctgcacgacagtgaggggagcacttaaggcaataacaggaaatcaaacctacagtacccctgcccctccatatagtgtatgttcgcccaagaaaggatacccaggtcctgggcttcagggactatccacttactcagtcaatttgagaaaatcatgtagaacgttcaagtcaacaagggagactgctgtaggccctcaagaatgacgttcccacccaaccccccagtatcatcctcacttcctgcagccctcggactcagttttcttttccctgggaggaaggttgggtaggttcaccatttgctttggtgatgaagcaggtcttaagatacccagaggtcaggctcaattgtgggaacttcttccatgatctcaagctggccagatgggctgggcccaacatgtgcctgtcattccagggaaaaattaaagggacttatgaataaattcctagaagcaggaggtaaggggctggctggactttctgtatcccagacttatcttcatggtttttttcatcaaatttgcctcctagttccatatctaaaacaagttacaatttaggaccaaatgagaaaggacagaggccctgtgtcttccttgacttttggacttgctgcagcgtctgggaccctccgtccagccctcactgtccttgctccatcttgtatgagaaccttgtgctgaacgggcccagtttccttgtatgatacaccatgtatttgctttgtcaaaatataggaaatcaataaactactagtatttctttgaagtttaaaaaaaaaaaaaaaaa

SEQ ID NO: 436 - DNA, 2570 bp, Mus musculus
gctggcgtaccccacgctggtccgaggtggcacagcgcgtctggagctgctcgaactgcagcggtcgggttctcccgccttcgccggcttccgaggagcgcagggccgtgcggtccccggcgaacctcgttcacgcctcacactcccgcaggtccacggagatcctcgccatgccctcgtccaggatccctgctctctgcctcggtgcgtggctgctgctgctgctgctgccccggttcgcgcgcgccgagggagcggttcccattcctgtcacctgctttaccagaggcctggatatccgaaaagagaaagcagatgttctctgcccaggaggctgctctcttgaggaattctctgtgtttgggaacatagtgtatgcgtcagtgtccagcatctgcggcgctgctgtccataggggagtgattggcacctcagggggacctgtgcgtgtctacagccttcctggtcgagagaactactcctcggtagatgccaacggcatccagtctcagatgctttcccgatggtccgcgtccttcgctgtgaccaaaggcaaaagcagtacccaggaagccacaggacgggcagtgtccacagcccacccaccttcaggtaaaagactaaagaagacaccagagaagaagactggcaacaaagactgtaaggcagacattgcatttctcattgatggaagcttcaatattgggcagcgccgatttaatttgcagaagaattttgttgggaaagtggcactaatgttgggaattggaacagaaggaccacacgtgggtctcgttcaagccagtgaacaccccaaaatagaattttacttgaaaaactttacttcagccaaagatgtcttgtttgccataaaagaagtaggtttccgagggggtaactccaacacaggaaaagccttgaagcacactgctcagaaattctttacagcagacactggtgtgagaaaaggaataccaaaagtggtggtagtgtttattgatggttggccctctgatgacattgaggaagcaggcattgtggccagagagtttggtgtcaatgtatttatagtttctgtggccaagcccattcctgaagaactggggatggttcaagatgttgcatttgttgacaaggctgtgtgtcggaataatggcttcttctcttatcacatgcccaactggtttggcactacaaaatatgtgaagcctctggtgcagaagctctgtacgcacgaacagatgatgtgcagcaaaacctgctacaactcagtgaacattgcctttctgattgacggctccagcagtgttggagatagcaatttccgcctcatgctagaatttgtttctaacatagcgaagacatttgaaatctcagacattggagccaagatagctgctgtacagttcacttatgaccagcgcaccgagttcagtttcactgactataataccaaagagaacgtcctagctgtcctagcgaacatccgctacatgagtggtggcacagctactggtgatgccatcgcctttactgttagaaatgtatttggtcccataagggacagccccaacaaaaacttcctggttattgtcacagatgggcagtcctatgatgatgtccgaggccctgctgcagctgcccatgatgcaggtatcaccatcttctctgttggtgtggcttgggcaccgctggatgacctgagagatatggcctctaaacccaaagagtcacacgctttctttaccagagagttcacagggttagaaccaattgtctctgacgtcatcagaggcatttgtagagacttcttagaatcccagcaataaccgatactctgacaactcaaggaatacgtgcaaggggatctaatgtgcaaattatattctcaatgcctatgtaactttatagcttaccagtgtcaaaaaatgcgtccacagctgtttaaagcaaatgaatattcatgtgatgctcacaatttagattggccgagacttgataatcaggcccttagaaactcaggaaagaagagttgtcatggattaacattgggagttcaaatatgcattcaagtggataggtaagctacacagctcaataaaagaacctggcgcttacacacaaagcactgttccctctttaatcactctgcattgaccatgcaaggaaaacagaacagcttttaaacacagatcaagtatacatattttgacccatgtggatgttttcttaaaaccagccaagaacagacagctgttattatgtgcactagccataactacacattatatggaatcatatatcaagcttcttttgtagtgtgttttcataacttgatggctgaaataccacactgagtaaaggtaggattgcctggtatttttctatttatatccttaattttatgtgtatagacaggcatgtactccgaggactaagaaaatgtttaagcagataacttttttttttttgaaaaaaaagatgtgtcaagtattgtaaccgaaaaaatacacagcttaatagcttggctgtcagcaataaaactgctagtgactaagtgcctatttatt

SEQ ID NO: 437 - DNA, 1910 bp, Mus musculus
gctgctaaaacagagaggctgtgaacaaggacattaccgagcaggagcatacattcagaagacaaggagccctgctcgctgcaccgaatatcttatcaaaaagactcctatctgtatgccaacccagacttccagaaagagatcagatccctgaatccccatcatcatgaactggcacatgatcatctcggggcttatcgtagtagtgatcaaagttgttggaatgaccttttttctgctgtatttctcacagatctttgggagaaatgacgaaagtaccatgcctacaaggagctatggaacagtctgtcccagaaactgggattttcaccaaggaaaatgctttttcttctccttctccgaatcaccttggaaagacagcatggattattgtgcaacacaaggatccacactggcaattgtcaacactccagagaaactgtatcttcaggacatagctggtattgagaattactttattggtttggtacgtcagcctggagagaaaaagtggcgctggatcaacaactctgtgttcaatggcaatgttaccaatcaggaccagaacttcgactgtgtcactataggtctgacgaagacatatgatgctgcatcatgtgaagtcagctatcgctggatctgcgaaatgaatgccaaatgatcatagatctctacaagagtgaatttttacagagctagcaaaggagattagttgtgactgaaaccagcccaggaaatatagagcatcaaagactgtgcccatcttccataggtggagttccctattgaatcctcaaagtcaatttgttactccacaaacatcttcacatagtaaaactccctttctgaccaagtattccctaagaccacacttcctgtgagaggggactggattctagttatctgcagacagagccaggattctggagatgaaatcaatatggaaatgcagtctgtttctgtagagctgagccttttaactaatcagtagggttttgtctgttgtcagaactgtttgatccttagagaacatgcccacgccactgaggagaaactgctcgtggaacagatatgagaactgttaggaagcactatgggcagaagaatataaacttggcttcacaacatcccccattccagaaagcctcccattcccatacaacatcgtagaagcagaggtccttctgaattggggaaggacctctacagctcgacttggtactgaacaaatattgagggaatgaagaaagttctgaataggacagagataaacaaggaggagaaggaaagagataggaagaaaggagaagtgggaaggagggggaaaaggaatgatgggcaggagaaaaagagacaggaggagccaggaaaaacactcaagctaaatttttttcaggttttggataaaatctattgtgacataaataatatcttttcattagaagagaaaaggcaaaattggggacaaatgggcaccatgagagatgaagcagaggttaatttgatcacaaggaaagaaaggcaggaatgaggttgaaaactttttggataccttggctgttatctcaagaaggtacaagctgcataaagtataggagaaaagagatgtgctggttgttttaagtagcaaaaattaaactacagagaagcctatagaaagctaaaggaattaaaaccatccaataatcaattcattattttcaactaatagcaatatgtatgtgcattactagtcaaaataaattgtgaattctgttattataatactaagttattttatagtttctaggtttcatatttcgtgtattagcagatttatattttaataggacaatgtacttcctattaaaacctgtttgaagaaggtcatcagaaatgatctagtagatactggaattacatttgtaccc

SEQ ID NO: 438 - DNA, 1418 bp, Mus musculus
gcggggcgtcccgagcgcgtgggcctgcgggtcgggtcaagaggtcgaaggtgctgcgcgtgatccaggatccgaattggcccggagcaggagcatggcgtcgtcggggtcggtgcagcagctgcccctggtgctgctgatgttgctgttggcgagtgcggcacgggccagactctacttccgctcgggccagacttgctaccatcccattcgcggggaccagctggctctgctggggcgcaggacttatcctcggccacatgagtacctgtccccagcggatctccctaagaattgggactggagaaatgtgaacggtgtcaactatgccagcgtcaccaggaaccagcacatcccacagtactgtggttcctgctgggcccacggcagcaccagtgccatggcagaccgaatcaacatcaagaggaaaggtgcatggccctccatcctgctgtccgtacagaatgtcattgactgtggcaatgctggctcttgtgaagggggcaatgaccttccggtgtgggagtatgcccacaagcatggcatccccgatgagacctgcaacaactaccaggccaaggaccaagactgtgacaagtttaaccagtgtgggacctgcactgaattcaaagagtgtcacaccatccagaattacaccctctggagagtgggtgattacggttccctgtccgggagggagaagatgatggccgagatctatgccaatggtcccatcagctgcgggataatggcaacagagatgatgtctaactacactggaggcatctatgctgagcaccaggaccaggctgttatcaaccacatcatctctgtagctggctggggtgtcagcaacgatggcatcgagtactggattgtccgaaattcatggggcgaaccctggggtgagaaaggctggatgaggatcgtgaccagcacctacaagggaggcacaggtgacagctacaaccttgccatcgagagtgcctgcacatttggggaccccattgtttaggtagatgtctctggaagcagcgctgtgaaccatgacagggaggggtgattaattactgacactggacatgtccagacagctataaacagtgcttgtggacatgaggaccagagtgtggactgcatcccgagaggagacggtaaaggatgaaacacaactgcactgggaccctccaccgtaccctccaggcctgcctcctccaccactgagccctccaggcctgcctcctcttctacagtgcttgccttcagccacccggagaagagagctatggtttaggacagctcaacttatcaccagatctggagccctggaatccatgggaggggggaacaagtccagactgcctaagaaatgagtaaaatatctggcttcccaaaaaaaaaaaaaaaaaaaaaaaaaa

SEQ ID NO: 439 - DNA, 1265 bp, Mus musculus
gctcaccatgatggatcctctgctggaagcaaatgctacttttgccttaaaccttttaaaaatattgggtgaagacagatccaaaaatgtatttttatcacccataagcatctcttcagcgctggtcatggtcttattgggggcaaaaggaaccactgcgatccagataactcaggcactgtctttgggtaaatgcagcagcagtgaagatggagacgtccaccagggcttccagttacttctcagcgaagtgaacaagactggcacacagtactcgctcaaagcagccaacaggctcttcggggaaaagacttttgatatcctagcatcttttaaagattcctgccacaagttctatgaagcagagatggaagagctggactttaagggtgctacagagcagtcccgacagcacatcaacacctgggtagccaaaaagacagaagataaaatcaaagagttgctatctccaggtacaatacattcaaacactccactgatcctcgtgaatgctgtctacttcaaaggaaagtgggagaagcagtttaacaaagaggacaccagggagatgccattcaaagtcagcaagatttatggctggatttactatatgagggagaaacctgtgcaaatgatgtttcagaagtctacctttaagatgacctatgtggaagagatatccaccaagattttgttgcttccctatgttggcaatgagctgaacatgatcatcatgcttccagatgaacacgttgaactgagtacggtggaaaaggaaataactcatgagaaatttatagagtggacgaggctggacaggatgaaaggagaaaaggtggaggttttcctcccatggtttaagctggaggagaactatgacatgaaggatgtcctctgcaagctgggcatgactgatgcctttgaggagggcagagcagacttttctggaatatcttccaagcaaggcttgtttctgtccaatgtcatacataaatctgttgtggaggtgaatgaggaaggctcagaggctacagctgccactacaattgttctgaaggggtcatcacggtccaccccttgtttctgtgttaaccgccccttcattttcttcattcagcacattaagaccaatgagattctgttccttggccggctctcctctccctgaggaaaggttgttcttgtcagtatttcatcctttctctgtggtttgcctgaaacccaagtgaccttatccataagtgcaatgacagctatgaaataaa

SEQ ID NO: 440 - DNA, 2525 bp, Mus musculus
gagtcacccccgcgcagcctaggcttgccgtgcgagtcggacttggtccgggcccaccgccctgctctgtactactactcggctttctcgtcaagatgcctgaggaagtgcaccatggagaggaggaggtggagacctttgcctttcaggcagaaattgcccagctcatgtccctcatcatcaacactttctattcaaacaaggagattttcctccgcgagttgatctctaatgcttcagatgccctggacaagattcgatatgagagcctgacggacccttctaagttggacagtgggaaagagctgaaaattgacatcatccccaaccctcaggagcgcacgctgactttggtggacacaggcattggcatgaccaaggctgacctcattaataacctgggaaccattgctaagtctggcacgaaggcgttcatggaggctctccaggctggtgcagacatctccatgatcgggcagtttggtgtcggattctactcggcctatctagttgcagagaaagtggttgtgatcacgaagcacaatgatgatgagcagtatgcctgggagtcgtctgcgggtggctccttcaccgtccgggcagaccatggtgagcccattggccggggtaccaaagtgatccttcacctcaaagaagaccagacagagtacttggaggagaggagggtcaaggaagtggtgaagaaacattcgcagttcataggctatcccatcaccctctatttggagaaggaacgggagaaggagatcagtgatgatgaggcagaggaagagaaaggtgagaaagaggaggaagataaggaggatgaggagaagcctaagattgaagatgtgggatccgatgaggaagatgacagcggcaaagacaagaaaaagaaaacaaagaagatcaaagagaagtacattgaccaggaggagctgaacaagacaaagcctatctggaccagaaacccggatgacatcacgcaggaggagtatggcgaattctataagagcctcaccaatgactgggaggaccacttggcagtcaagcacttctctgtagaaggtcagttggaattcagggcattgctcttcattccccggcgggctcccttcgacctttttgagaacaagaagaagaagaacaacatcaaattgtatgtccgccgtgtgttcatcatggacagctgtgacgagctgatacctgagtacctcaactttatccgcggtgtggttgactccgaggacctgcccctgaacatctcccgggagatgctgcagcagagcaagatcctgaaggtcatccgcaagaacatcgtcaagaagtgcctggagctcttctccgagctggctgaggacaaggagaactacaagaagttctatgaggccttctccaaaaatttaaagcttggaattcatgaagattccactaaccgacgccgcctctctgagctccttcgctatcacacctctcagtctggagatgagatgacctccttgtcagagtatgtgtctcgcatgaaggagacccagaagtccatctactatatcactggtgagagcaaagagcaagtggccaactctgcctttgtggagcgagtgcggaagcggggcttcgaggtggtgtatatgactgagcctattgacgagtactgcgtgcagcagctcaaggagtttgatgggaagagcctggtctcagtgactaaggagggcctggagctaccagaggacgaggaagagaagaagaaaatggaggagagcaaggcaaagtttgagaatctctgcaagctcatgaaggagatcttggacaagaaggttgaaaaggtgacaatctccaataggcttgtgtcttcaccctgctgcattgtgacaagcacctatggctggacagccaacatggaacggatcatgaaggcccaggcactgcgagacaactctacaatgggctacatgatggccaaaaaacacctggagatcaaccctgaccaccccatcgtggagaccctgcggcagaaggctgaggcagacaaaaacgacaaagctgtcaaggacctggtggtgctgctgtttgaaactgctctgctctcctctggtttctcacttgaggatccccaaacccactccaaccgcatctaccgcatgattaaactaggcctgggcatcgatgaagatgaggtcactgcagaggagcccagtgctgctgttcctgatgagatcccccctctggaaggcgatgaggatgcctcgcgcatggaagaggtggattaaagcctcctggaagaagccctgccctctgtatagtatccccgtggctcccccagcagccctgacccacctggctctctgctcatgtctacaagaatcttctatcctgtcctgtgccttaaggcaggaagatcccctcccacagatagcagggttgggtgttatgtattgtggtttttttgtttgttttattttgttctaaaattaaaagtatgcaaaataaagaagatgcagttttaaaaaaaaaaaaaaaaaaaa

SEQ ID NO: 441 - DNA, 721 bp, Mus musculus
acggatatggaagtcgagtcatggagaagtccagtcatcggttcccagcagcacagttggaaggaacagatttgcacaaacgcagagatgagattcttactcaaaacaggctgcttgtctaacccccaggcttcagaagaagcagagatgggcaatgttcagagggtctctctgcccagagaacattctccactgcctatgagggctgacaaacaccccaaactccttagcatgcaggaggatctgtggggagggcattttcattgcacgcccgcccgcagcacaggtccttctcctccagtaggctgcagcttggtactcctctgctaggagatggaagaagaccagagtcctgctgggactaagataagcaacatctgaaaggcatcgaggaaccaggagctgggaggagaggaagagatagaggagactggagagacaaatttctgcagagtgtcctctccaggagttccaatgccgccccaccccccttgtagcatgaaccagaggccaggaggcctgagtgagcacggcccatcaggggaggaaggtgcctcttgcctgcttttcttttgtttcagagatgcccagaggcttacaacttctgctacacaccaccatgctatgcagcctcacttcacgctcagaaacaataggcaaaccaggcagactgtaacctccgaaactgtgagccaaataaacctcatctctttttaagttg

SEQ ID NO: 442 - DNA, 2851 bp, Mus musculus
gactcactctttcaaagcctggaataaaaaccacagccaacttccgaagcggtctcattgcccagcagcccccagccagtgacaggttccattcaccctcgttgcccttctccccacgacccttttccagaggcgactagatccctccgtttcatccagcacgccatggacaagttttggtggcacacagcttggggactttgcctcttgcagttgagcctggcacatccacatcagcagatcgatttgaatgtaacctgccgctacgcaggtgtattccatgtggagaaaaatggccgctacagtatctcccggactgaggcagctgacctctgccaggctttcaacagtaccttacccaccatggaccaaatgaagttggccctgagcaagggttttgaaacatgcaggtatgggttcatagaaggaaatgtggtaattccgaggattcatcccaacgctatctgtgcagccaaccacacaggagtatatatcctcgtcacgtccaacacctcccactatgacacatattgcttcaatgcctcagcccctcctgaagaagactgtacatcagtcacagacctacccaattccttcgatggaccggttaccataactattgtcaaccgtgatggtactcgctacagcaagaagggcgagtatagaacacaccaagaagacatcgatgcttcaaacattatagatgacgatgtcagcagcggctccaccatcgagaagagcaccccagaaagctacattttgcacacctaccttcctactgaacagcctactggagatcaggatgactccttctttatccggagcaccttggccaccagagatcgagactcatccaaggactccagggggagttcccgcactgtgactcatggatccgaattagctggacactcaagtgcgaaccaggacagtggagtgaccacaacttctggtcctatgaggagacctcagattccagaatggctcatcatcttggcatctctcctggcactggctctgattcttgccgtctgcatcgcggtcaatagtaggagaaggtgtgggcagaagaaaaagctggtgatcaacggtggcaatgggacggtggaagacaggaaacccagtgagctcaacggggaggccagcaagtctcaggaaatggtgcatttggtgaacaaggaaccatcagagaccccggaccagtgtatgacagctgacgagacccggaatctgcagagtgtggacatgaagattggggtgtagtgcctacgccattaacttgaaaagacagcacgattggagacgtcattcctgggagctgggaccctccacagatgcaatgtgctactgactattattattggggattatgtttagcataaaattttctattccttttttattttatgtcattttttttagagtctgttccaatttatgaaaatagcattgctttctgaaatgagggcccaaataatactccattaagaatttgacttttccagttccttcctaggggccttgcattaccagggtatgctaccataggcttctaccaaatgcacattcttggtccctattgaaccttatccctacccaaagtcccagggaacatccaccagctaaggattttccccagaacctagattggtctctgggaggaaatttgaatgggtccatattgcctctccagcagtccaatccttaggcattgctttccagcggggtgggagatcaggtgtactggttacatactctctttatagactcccttctgctggaaaattttcagatgcttctgagagatccccaaagggtgatgctatttatctttagtaagctatttatctttgtttttgaaatatcaaaccctggaggtcctttgttcagtatgacctttttttttattttgttttattttgttttgttttgttttgtttttttaggttactttatcagaagcataacagggtataaattgattcataataagtaccggtccatcttccatcttgacccgttgtgctgtgatccttcagtttctaaacaagcaaagtctgagtctttgtagcacatcagtgtggccttagtatggtcctcctaagctcatgctagagcatctgagcctgctgggttcacccagctcaatctcattgaagatcagggacaggagcactgttttcattccaggctctcaaaggggtttctctcctgttcaagaatctgaagtgagagtaggcaagcttcagtcccttttgtgctttggtgaccacccttttctatttcttaaagaacacattaagtttttatatcttacaacgtttgtggtcctgtgtcatagagaatgatcttattagtgatttcacaaaacattgtggtggggacttgtggcgccttctcataaaaggagaagccaacagaaatgaaggtgtaaacatccagcagtagcttgccacgaggaggaggtgtgatgtacaacccccatctcactctagccatggctgtgtttgttggtgctttcacaagcgagttggtacttagaatcagttccctggggaacccctcaaaaagccacaggactgcccaccactgggatcttatcatcagataagcaggtttatggtttagcaaaaggagaatgctgttaccctcatagttttcacatattgggcaagtgttcattcatctgccaggatgtcccattgctcctggatcttcctaggtatcttgtagaatatattaactctataaaataaggctgtctctaaaatggaacttcctttctaagggtcccacttttactgttgactaaatttatatgtttagtagttttttttttccaataaaaacg

SEQ ID NO: 443 - DNA, 1059 bp, Mus musculus
cccacgcgtccggcggagctgtggagcctcctggtctccagcatcagttcctgggtcctgtccgaaggcacgctcaggagcagccaagcggtagaagccgggtggcatggcagcgagcacggacatagctgggctggaggagagcttccggaagtttgccatccatggcgaccccaaggccagcgggcaagagatgaatggcaagaactgggccaagctgtgcaaggactgtaaggtggccgacggaaaggccgtaacgggcaccgacgtcgacatcgtcttctccaaagtcaaggcgaaatctgctagagtaatcaactatgaggagttcaagaaggccctggaagagctggcaactaagcggttcaaggggaagtccaaggaggaggcctttgatgccatctgccagctgatagcgggcaaggaaccggccaacattggcgtcaccaaagctaaaacgggtggtgctgtggaccggctgacggacaccagtaagtatacgggctcccacaaagaacgctttgatgagagcggcaagggaaagggcatcgctggacggcaggacatcctggacgacagtggctacgtgagtgcctacaaaaacgcaggcacctatgacgccaaggtgaagaagtgacacctgccaaagcccccagggaggctgtcccactggaggcccaggcctggggtccagggtcacatggagcaagaaagcctggctccctccctgctggatctgccaccaagagcttcctgcccagtcccagggccatcccatcaggcctctgacccagactgctgtgtcccttcttcctgtctccctgtcatctgtctgggagtcagtgcctatatcctcaccgccccagcctggtcccaggcatggctgactcttgcctgcttttgcctcatatttaagctgctgctctggccaagtgcctaattcttacccagacctcaataaagataccttttgtaccaggaaaaaaaaaaaaaaaaaaaaaaaaaaaaaaaaaaaaaaaaaaaaaaaaaaaaaaaaaaaaaaaaaaaaaaaaaaaaaaa

SEQ ID NO: 444 - DNA, 2615 bp, Mus musculus
ggcgcgcgcgcggcgtgaagggcggcggacaggatgcgagcgcagtggccgggacaactctgggcggctctgctggcgctgggggcgctggcgggcgttgttgttggagagtccaacatctgtaccacacgaggcgtgaactcctgccagcagtgtctggctgtgagtcctgtgtgtgcctggtgctcagatgagactttgtctcagggctcaccccgatgtaacctgaaggagaacctgctgaaggacaattgtgctccagagtctattgagttcccagtcagtgaggcccagatcctggaggctaggccactcagcagcaagggctctggaagcagcgcccagatcactcaagtcagccctcagaggattgtccttcgactacggccagatgattcgaagatcttctcacttcaagtgcggcaggtggaggattaccccgtggacatctactacttgatggacctgtctttctccatgaaggatgatctgtccagcatccagaccctgggtaccaagttggcctctcagatgcgcaagcttactagcaaccttcggattggctttggggccttcgtggacaagcctgtatcgccgtacatgtacatctccccaccacaggcaatcaaaaacccctgttacaatatgaagaatgcctgcttgcccatgtttggctacaaacacgtgctgacgctaaccgaccaggtgtcccgcttcaatgaagaagtgaagaaacagagcgtgtcccgtaatcgagatgccccagagggcggctttgacgccatcatgcaggctacagtatgtgatgaaaaaattggctggaggaatgacgcatcccatttgctagtgtttaccacggatgccaagacccatattgccctggatggaagactggcaggcattgtcctgcccaatgatgggcactgtcacattggcaccgacaaccactactctgcctccactaccatggactacccatctctggggctgatgactgagaaactatcccagaaaaacattaacttgatctttgcagtgactgaaaatgtcgtcagcctttaccagaattatagtgagctcattcctgggaccacagtgggagtcctgtctgatgactcaagcaacgtcctccagctcattgttgatgcttacgggaaaatccgctctaaagtggagctggaagtacgtgacctgccgggagagctgtcactgtccttcaatgccacctgcctcaacaacgaggttatcccgggcctcaagtcttgtgtgggcctcaagattggagacacggtgagctttagtatcgaggccaaggtgcgtggctgcccccaggagaaggagcagtctttcactatcaagcctgtgggctttaaggacagcctcaccgtccaggtgaccttcgactgtgactgtgcctgccaggcctttgcccagccttccagcccacgctgcaacaatgggaacgggacttttgagtgtggggtgtgccgctgtgaccagggctggctggggtccatgtgtgagtgctctgaggaggattaccgaccctctcagcaggaagagtgcagccccaaggagggccagcccatctgcagccagcggggagagtgcctctgtggccagtgtgtctgccatagcagcgacttcggcaagatcactggcaagtactgtgagtgcgatgacttctcctgcgtccgctacaaaggggagatgtgttccggccatgggcaatgtaactgtggggactgcgtgtgtgactcggactggactggctactactgcaactgtactacacgcactgacacctgcatgtccaccaatgggctgctgtgcagcggccggggcaactgcgagtgcggcagctgtgtgtgcgtccagccaggctcctatggagacacctgtgagaagtgccccacctgcccagatgcctgctcctttaagaaggagtgtgtggagtgtaagaagttcaaccggggaacgctccatgaagaaaacacctgcagccgctactgccgggatgacatcgagcaggtgaaagagctgacggatactggtaaaaacgccgtgaattgtacctacaagaacgaggatgactgtgtcgtcagattccagtactacgaagacaccagtgggagggcagtcctctatgtggtggaagagcctgagtgtcccaagggtcctgatatcctggtggtactgctgtcagtgatgggggccatcctgctcattggccttgctactctgctcatctggaagctactcatcaccattcatgaccggaaggaatttgctaaatttgaggaagaacgagccagagctaagtgggacacagcaaacaacccgctgtataaagaggccacctccaccttcaccaatatcacctaccgggggacttaatgagaccacttcagatgacgccaggaccgtgggactctctgccattatgtttacagaggacaatttgtgtgtgtgtgtatgggtgggatttggggcgtgggttgggctgggctggaagaatgtcagtatgtgggaatgtatctctctgtgtgtacttatgtgtgtgacgagtgtggggaaatgtgtaatttaaaacttgtgatgtgtctcacaggcag

SEQ ID NO: 445 - DNA, 4290 bp, Mus musculus
gacagcggcacccacagcccatggagctctcgactgttctcctgctgctaggcctctgctccgctggccttgttctgggctccgaacatgagacgcgtctggtggcaaagctctttgaagactacagcagtgtagtccggccagtggaggaccaccgtgagattgtacaagtcaccgtgggtctacagctgatccagcttatcaatgtggatgaagtaaatcagattgtgacaaccaatgtacgtctgaaacagcaatgggtcgattacaacttgaaatggaatccagatgactatggaggagtgaaaaaaattcacatcccctcggaaaagatctggcggccggacgtcgttctctataacaacgcagacggcgactttgccattgtcaaattcaccaaggtgctcctggactacaccggccacatcacctggacaccgccagccatctttaaaagctactgtgagatcattgtcactcactttcccttcgatgagcagaactgcagcatgaagctgggcacctggacctatgacggctctgtggtggccattaacccggaaagtgaccagcccgacctgagtaacttcatggagagcggggagtgggtgatcaaggaagctcggggctggaagcactgggtgttctactcctgctgccccaccactccctacctggacatcacctaccacttcgtcatgcagcgcctgcccctctacttcattgtcaacgtcatcattccctgcctgctcttctccttcttaaccagcctggtgttctacctgcccacagactcaggggagaagatgacgctgagcatctctgtcttactgtccctgaccgtgttccttctggtcattgtggagctaatcccttccacctccagcgctgtgcccctgatcgggaagtatatgttgttcaccatggtctttgtcattgcgtccatcatcatcaccgtcatcgtcatcaacacacaccaccgttcgcccagcacccacatcatgcccgagtgggtgcggaaggtttttatcgacactatcccaaacatcatgtttttctccacaatgaaaagaccatccagagataaacaagagaaaaggatttttacagaagacatagatatatctgacatctctgggaagccgggtcctccacctatgggctttcactctccgctgatcaagcaccctgaggtgaaaagcgccatcgagggcgtgaagtacattgcagagaccatgaagtcagaccaggagtccaataacgccgctgaggaatggaagtatgttgccatggtgatggatcacatcctcctcggagtctttatgctggtgtgtctcatcgggacgctggctgtgtttgcaggtcggctcattgagttacatcaacaaggatgagcagaggctgagctaagcctacctctgtcccagccatagccatcgctaggaaagatggaagagaggaaggtctgtctccttgaatcctttcacacttaccaaacatgcagtgttctacatgtcctacatgttaatgagagtgatctctgctcacacggctgtattcttgaagtgtctcccctttgcttctgcttttaacactatgggcctccttaaagggcgaaccctttgaagtaaataaaagtgagccctcaaaagaagtgtttgcttctaaatggcccctgggagagttttgcttggatactcaaggttttctgtttgtattgccatggctagttgtttttgttttctttcctttaataaatataattgtacttatatgagtgatccgcctacgtgtatgtctcacatacacgcctagtgtccatgaaggtcagaagaaggtatcccatctcctagaactggaactacaaatggttgtgagcgtccacatggaacctgggaatcaggccctctggaagagcacccagtgttcttaaccactgaaccacccacctatcgggctcagttaatttttatttttaaagtgctgagagtcccttacttaagacacacggtttcatacctactagaaaagtcgtgtctaccagattccccagatttgatgtggacacaaaggaagtggtagaaaggaaattaggtaactttaaacttaaaaaaaaattgtgtgtgtgtgtgtgtgtgtgtgtgtgtgtgtgtgtacatactcgcacacattgatgaaattgggggacaacttttaggagttagttctcatcttttatctcatttgaggcaaagtatcttgtgatttctgccgctgtgttacattctcatgtaaagcttcctggggcattttcctttctatacttctcggcccatgaacagagtgcagggattccagatgcatgccgccatctccagcttttcataggtcctaggatagaatttaggtcgttaggtttgtccagcaaaaaactacttttacctgcttaatccatttcactggcccaaaggtaattttagggcgatcacatacaaatagtatcaaaacctcatggtttaaagtagacttctgaaaccaggagagggagaatgctttcttaagtgatttctgtttgagaggccttcttgaaagggcgcttgggattccttgggattgtacctagagctttgcacacagagctataactgagcctcagctctcccaacttaacggagccccctggattttgttctcaggacccgaggaagggcagatcccatcctcatcaagggtgtgcctctgaccccatgagaatcgtctcgcccgcatgggtttattttatccaaattgttttacacagtctccataatgtccctaatttacaaatggaaaaaaaaatttttggggaaagttaaactctgctccatctagaagtagaagaactgagatctgaacccagacagaacttaagattctaaaacaggggctggagagatggctctatggttaagatcattcccagcaaccacagggtgcatggtggctcacaaccatctacagtgggatctgatgccctctgctggtgtgcaggtgtgcatatacaaagcactcacacataaatacataaacaaacaaacaaatattttttaaagatttatttatttattatatgtaaatacactgtagctgtcttcagacactccagaagagggcatcagatcttgttacagatggttgtgagccaccatgtggttgctgggatttgaactctggaccttcagaagaacagtcgggtgctcttacccactgagccatctcaccagccccaaatattttttttaaaagtcaaaaagaaaagggattctaaaccgacttgcagctgatggggtcacctgctccctgctctcccagcatgcctggcgtgatctaagtagttctggtctgtgttggtggggactctgtgatatcctatttcctgccttctcaattaaaacccctggcttttccttcagtccttggacgcaatcatgtttggagttcaggccctatgaatggaaccagaaacgtatgcacacaccatcaccatttctgaaatctgaaaaataaattctctgtgccaaactctaggctctagtacaatttacccagaccaagaagccgtgtggctctggacgcagaaaaggcctttgaatcacaaacacatctgatccgtcatctccagggagagctataaactgcataaccaggaggccagtgcgagcccaggtggcttcaatctcctgagggacttcccatcacccctgcaccagtgctgggctctttcatctcaaatagtttgcactttaaagtggaaacaattggcagtttctcagaaagtcacactcgggtcaccaagtcactcagcagtcccattcccaggtagagagccaaagaaatcgaaagaaagacttacacaatttgtatgagaacacgcacagaaggcaagagccagagaaagcggtctaggctccaacccacagacgacaagcaaaagggatgtggagaatgggttttggggtgtatgtgtgtaggcctggggggccatcgcctttttgttttgttgttgtttttgagatagagtttctcactggcctggaacttgccaagtagtttaggctggctaggcaggccattccgagatctgcctgtctcctctttctgcaaacaatttagttggcatgggttctggggctcttactcagatctaaaaacaagcattttgtcagttgatctaattctttagctttttctactcacgaccactttttgcttgagaaatgttatgtagaaatataaaatatgtataaaaataaataacaaagaaatttaatt

SEQ ID NO: 446 - DNA, 876 bp, Mus musculus
tccaatccattactcgctgagtgatctactccagtgcctgaggcagttcccttggagatgtcctgtcagcagagccagcaacagtgccagccccctcccaaatgcaagaccccaaagtgccctccaacctcttcctgctgtagcctgggttctgggggctgctgtggttccagctccgggggctgctgcagctctggatgtggtggctgctgtctgagccaccacaagccccgattctctctccgtcgccgacgtcacagctctggatgctgtagcagcggtggcagcagttgctgtggcagcagcggtggcagcagttgctgtggcagcagcggtggcagcagcggtggcagcagcggtggcagcagcggtggcagcagttgctgtggcagcagcggtggcagcagcggtggcagcagttgctgtggcagcagcagcggtggcagcagttgctgtggcagcagcagtggtggcagtagcggtggcagtagcggtggcagcagctgctgtggtagcagtgggggcagcagtggtggcagcagcagtggcagcaacagccatcagcagtctgggggctctagctgctgctctggaggttgctgctgacctggccacgaagaacatggaaagcagcattgactgaagatctgcaagcctagggtctcctcttctctggttttcccgcagaagtacttagaactctctgtacgtcctcttcatctccctaaggctcatctaccacgaggtcttcaggtcccagctctgagatgcatgggctttgctttttttctctgacacaactaattgagaatgagatattgaaaaattagctttgaaaaatctttttctgggcaataataaagcttttgattcctg

SEQ ID NO: 447 - DNA, 6019 bp, Mus musculus
cctcataaagcttcaagtttggacccacggtcgaagttgcatccctaaaggcaggctctctcactgggctgcaaccaatagcccgcagccatgagttccgacgccgagatggccgttttcggggaggctgctccttacctccggaagtctgaaaaggagcgaatcgaggctcagaacaagccttttgacgccaagtcatcggtgtttgtggtggatgctaaggagtcttttgtaaaagcaacggtgcagagcagggaaggggggaaggtgacagccaagaccgaaggcggaactactgtaacagtaaaagatgatcaggtctaccccatgaaccctcccaagtacgacaagatcgaggacatggccatgatgacccacctgcatgagcccgctgtgctgtacaacctcaaagagcgttatgcagcctggatgatctacacctactcgggcctgttctgcgtcactgtcaacccctacaagtggctgccagtgtataacgcagaggtggtggcagcctacagaggcaaaaagcgccaggaggccccaccccacatcttctccatctctgacaatgcctaccagttcatgctgacagatcgggagaaccagtctattttgatcaccggagaatccggggccgggaagactgtgaacacgaaacgtgtcatccagtactttgcaacaattgcagtcactggggagaaaaagaaggaggaggcaacttctggcaaaatgcaggggacgctggaggaccaaatcatcagcgccaaccccctgctggaggcctttgggaacgccaagaccgtgaggaatgacaactcttcccgctttggtaagttcatcaggatccactttggtaccacagggaaactggcttctgctgatattgaaacatatcttctggagaagtctagagtcactttccagctaaaagctgagagaagctaccacattttttaccagattatgtctaacaagaagccggatctaatcgaaatgctcctgatcaccaccaacccatacgactacgcctttgtcagtcagggggagatcacggtgcccagcattgatgaccaagaagagttgatggccacagatagtgccattgatattctgggcttcacttctgatgaaagagtctccatctataagctcacaggggctgtgatgcattatgggaacatgaaattcaagcagaagcaacgagaggagcaggctgagccagacggcaccgaagttgctgacaaggctgcctatctccaaaatctgaactctgctgacctgctcaaagccctgtgttaccccagggtcaaggtcggcaatgagtatgtcaccaaaggccagactgtgcagcaggtgtacaactcagtaggcgccctagccaaagccgtctatgagaagatgttcctgtggatggtcacccgcatcaaccagcagctggacaccaagcagccccggcagtacttcatcggggtcttggacatcgctggctttgagatctttgatttcaacagcctggagcagctgtgcatcaacttcaccaacgagaaactgcaacagttcttcaaccaccacatgttcgtgctggagcaggaggagtacaagaaggagggcatcgagtgggagttcattgactttgggatggacctggcggcctgcatcgagctcatcgagaagccgatgggcatcttctccatcctggaagaggagtgcatgttccctaaggcgacagacacctccttcaagaacaagctgtatgagcagcatcttggaaagtccaacaacttccaaaagcccaaacctgccaaaggcaaggttgaagctcacttctccctggtgcactatgcgggcactgtggactacaacatcgctggctggctggacaagaacaaggaccccctgaatgagactgtggtggggctgtaccagaagtcttcaatgaaaactctggcttacctcttctctggggcagcagcagctgcggaagcagagtctggtggcggtggtggaaagaaaggggccaagaagaagggttcctccttccagaccgtgtcagccctcttcagggagaatctgaataagctaatgaccaatctgaggagcactcacccccactttgtacggtgcatcatccccaatgaaaccaagactcctggtgccatggagcacgaactggtcctgcaccagctgaggtgtaacggggtgctggagggcatccgcatctgcaggaagggcttccccagcaggatcctctatgcagacttcaagcagagatataaggttttaaatgcaagtgccatccctgagggacagttcatcgatagcaagaaggcttctgagaagctcctgggatccattgatattgaccacactcagtataagtttggtcacaccaaggtctttttcaaagctggtcttctggggctcctagaggagatgagagatgacaagttggcccagcttataacccggacccaggctatgtgcagagggtacttggcgagagtggagtaccagaagatggtggagagaagagagtccatcttctgcatccagtacaacgtccgcgccttcatgaatgtgaaacactggccctggatgaagctgtatttcaagatcaaacctctcttgaagagcgcagagaccgagaaggagatggccaacatgaaggaagaatttgaaaaagctaaagaaaaccttgcaaaggcggaggccaaaagaaaagagctggaagaaaagatggtagctctgatgcaagagaaaaatgacctgcagctccaagttcagtctgaagcagacagcttggccgatgcagaggagcgatgcgaccagctgatcaaaaccaaaatccagctggaggccaaaatcaaagaggtgaccgagagggccgaggatgaggaggagatcaacgcagagctcacggccaagaagaggaagctggaggacgagtgctcagagctgaagaaggacatcgatgaccttgagctgacactggccaaggttgagaaggagaagcacgccacggagaacaaggtgaaaaacctgacagaggagatggcaggcctggatgaaaccatcgccaagctgaccaaggagaagaaggccctccaggaggcccaccagcagaccctggatgacctgcaggcagaggaggacaaagtcaacaccctgaccaaagccaaaatcaagctggaacagcaagtggatgatcttgaaggctctctggaacaagaaaagaaaatccggatggatcttgaaagagccaagaggaaactggagggagacctgaaactggcccaagagtccacaatggacgtagaaaacgataaacagcagcttgatgagaaactcaaaaagaaagagtttgaaatgagcaatctgcagagcaagattgaggacgagcaggccctcggcatgcagctgcagaagaagatcaaggagttgcaggcccgcatcgaggagctggaggaggaaatcgaggcagagcgggcctccagggccaaagcagagaagcagcgctctgacctctcccgggaactggaggagatcagcgagaggctggaagaagctggcggagccacttcagcccaaatcgagatgaacaagaagagagaggctgagttccagaaaatgcgcagggacctggaggaggccacgctgcagcatgaagccacagcagccaccctgaggaagaagcacgcggacagcgtggctgagctcggggagcagatcgacaacctgcagcgggtgaagcagaagctggagaaggagaagagcgagatgaagatggagatcgatgacctcgctagtaacatggaggtcatctccaaatctaagggaaaccttgagaagatgtgccgcacactggaggaccaagtgagtgagctgaagaccaaggaggaggaacagcagcggctgatcaatgagctgactgcgcagagggggcgtctgcagacggagtcaggtgaatactcacgccagctagacgaaaaggattcattagtttcccagctctccaggggcaaacaggcattcactcaacagattgaggagctgaagaggcagcttgaagaggagataaaggccaagagtgccttagctcatgctcttcagtcctcccgccatgactgtgacctgctgcgggaacagtatgaagaagaacaggaagccaaggctgagctgcagagggccatgtccaaagccaacagtgaagtggcccagtggaggacaaaatatgagacggatgccatccagcgcacagaggagctggaggaggccaagaagaagctggctcagcgtctgcaggatgctgaggagcacgtagaagctgtgaacgccaagtgcgcttccctggagaagacgaagcagcggctgcagaacgaggtggaggacctcatgattgatgtggagaggaccaacgcagcctgcgccgccctggacaagaagcagagaaactttgacaagatcctggcagaatggaaacagaagtatgaggaaacccatgctgaacttgaagcctcccagaaggagtcccgctctctcagcacagagctgttcaagattaagaatgcttatgaggaatctttagaccatctcgaaaccttgaaaagggagaataagaatttgcaacaggagatttctgacctcactgaacagattgcagaaggagggaaacgcatccatgaactggagaaaataaagaagcaaattgagcaggaaaaatctgagctccaggctgctttagaggaagcagaggcatctctggagcacgaggagggaaaaatcctgcgcatccagctggagctgaaccaagtcaagtctgagatcgacaggaagattgctgagaaggatgaggagatcgaccagctgaagagaaaccacattagagtcgtggagtccatgcagagcacgctggatgctgagattaggagcaggaatgacgccatcaggctcaagaagaagatggagggagacctgaacgagatggaaatccagctgaaccactccaaccgcatggctgccgaggccctgagaaactataggaacacacaaggcatcctcaaggacactcagctgcacctggacgatgctctccggggccaggaggacctgaaggagcagctggccatggttgagcgcagagccaacctgctgcaggctgagatcgaggagctgcgggccaccctggagcagacggagaggagcaggaagattgcagagcaggagttgctggatgccagtgagcgcgtgcagctcctccacacccagaacaccagcctcatcaacaccaagaagaagctggagacagacatttcccaaatccagggagagatggaggacatcgtccaggaagcccgcaatgcagaagagaaggccaagaaagccatcactgatgccgccatgatggcggaggagctgaagaaggagcaggataccagcgcccacctggagcggatgaagaagaacctggagcagacggtgaaggacctgcagcaccgtctggatgaggctgagcagctggcgctgaagggcggcaagaagcagatccagaaactggaggccagggtccgtgaacttgaaggagaagtggaaaatgaacagaagcgcaacgtggaagctatcaagggtctgcgcaaacatgagagaagagtgaaagaactcacttatcaaactgaggaagaccgcaagaatgttctcaggctccaggaccttgtggacaaactgcaatcaaaggtcaaggcctacaagagacaagctgaggaagcggaggaacaatccaatgtcaacctggccaaattccgcaagatccagcacgagctggaggaagccgaggagcgggctgacatcgcggagtcccaggtcaacaagctgcgggtgaagagccgggaggttcacaccaaaatcataagcgaagagtgattgatccaagtgcaggaaagtgaccaaagagatgagcaaaatgtgaagatctttgtcactctgttttgtactcataactttgggagataaaaaatttatc

SEQ ID NO: 448 - DNA, 2069 bp, Mus musculus
agagagaggatcagggacgctgaggagcgtggtgcacaccgctgctgcgtagagccacatgaagcctgtggaggaaccaggatcagagagcggcaagcgagctgcgcctgaggagggcgccttctcccgaagccgctgacacccgggggaacctttttccttgttcctggactaaaacgcttctcccgaatatccagaatggtgttcccgaagttgatctggatgggtttcttttgccacctgtgtcgaggctactttgatggccccctgtacccagaaatgtctaatgggactttgcatcattacttcgtgcctgatggagactatgaggagaatgatgaccccgagaaatgccagctgctcttcagggtgagtgatcgcaggcgctgctcccagggggaagggggccaagccagtagcttgctgagcctcactcttcgagaggagttcacagtactgggccgccaggtggaggatgctggacgcgtcctggagggcatcagcaagagcatctcctacgacctggatggggaagagagctatggcaagtacctgaggcgggagtcccaccagatcggggatgcctactccaactctgacaagtccctcactgagctggaaagcaagttcaagcagggccaagagcaggatagccggcaggaaagcagactcaatgaggacttcctggggatgctggtccacaccaggtccttgctgaaggagacactggacatctctgtggggctcagagacaaatacgagctgctggcacataccatcaggagccatgggacccgcttaggtcgactgaaaagcgactatctggagggtggggcacagaagacaggctaatatttccattgtaactgcttcattttatccaaatttgcactttcagaacacgtctgaagtcatctttcgaaaagaaagaaaaattttaataagttgagttattctgattttagtttggttttgtgcattatttatgttattattaaggatttttcacttgcaaaaaaaagcaattttaaactaacccctgggttatttcctaaagggttttattgctctaacagaatctcttctttcgactccatctaaaggatgcatttgtgtggaaagactgattaaacttccacatcctggcgggggacgaggtgcgtggctcctttgcatcagcaggcttctctttggtctctgaaggctgagatgcctgattttcagatgaggtcccaggtgtgtggcatgcctgccagacaaggaagttcattgattctcctttcgctcttatttatttaccatgttcttagttgtttctgttttgttgtaagagtgttattgagaatttgcatgcaaatcaccaccagtaagatgttcaaagttccattgtgggtttgtgtaagttgaagatgcaacatttaagatagcaaaactttagggtggttgcccactcatgatgtgtctttcacttcaccatcaaagaaacagattgcttaacactcaagtgtctatgatttaagttgtcagcatgtttttttcttcttggactcagatagcattgcttccttttgtttattgaaaacttatatttccagagggagggtctaactatagaaatcccttatgtacattttattactcagccaataaatgttttcatataatactggctttttttctagtttacagtcataactctcatatttcagagagggactagtgcaaaggagaggggagataggattgaagccagtttatcagagtatatgataaggatgagattttaaaaagaaaaacagagggagaaggtgctgtatttttgagtatcttaccctgtctgctcacatacaccatcctagtaaggggtagtgggatctagcctgtacaagaattatacatttgatttccactcttctgatggaaaaatcttaaatttctctcatttttcatagactccattggaaatgtgtgacaaaggtccatatctcctatgcactcattctgtgttagtgatgcctaacaatttgaaagctatttctatgctcttaaaataaatgaattaaaatgtg

SEQ ID NO: 449 - DNA, 685 bp, Mus musculus
cggcctgaaagctttgtcctctgaagctgtatgcccaccgggggaacagtgttttctgctcccttggtttccaggaaccttagggaggcacctcatgccctggctacaggaagcagtcacgtgtggaccctttattaggcactgccatataagctcagggcacaagagaccaggacatccctaggcaaagatcagcaagcaaaggccatgctgactgcaatgttgctgagttgtgttctgctgttggcactgcctcccacactgggggtccagatgggcgtggctccactgaagggcatcagaaggcctgaccaggctctgttcccagagttcccaggtctaagtctgaatggcctcaagaagacaactgcagaccgagcagaagaagttctgctgcagaaggcagaagctttggcggaggtgctagatccacagaaccgcgagtctcgttctccgcgtcgctgtgtaaggctgcacgagtcctgcttgggacagcaggtaccttgctgcgacccgtgcgctacgtgctactgccgcttcttcaatgccttttgctactgccgcaagctgggtacggccacgaacctctgtagtcgcacctagccaatggatgttgtttgggcaaaggcaggggatgagaataaaggatgggacggtttaaaaaaaaaaaaaaaaaaaaaaaaaa

SEQ ID NO: 450 - DNA, 3631 bp, Mus musculus
ttgtgctttctgttgcaggagatggaagaggcatctttggagccaggtactgtcaatgcagggctcagcagtgggttctgcccacagtggggaggctcttgctaaccagtggccgcactctagcatgcactgctctagaacttacagtccagagcacaccaggacatagagattggaaacccagctgtatcacaagatctgtgtatatggccagcaatcgtgcggcatcctgcccacatggcgaagacttcggtcgccgccctgcctttaaacagaagcatgtgctctgtgctgccagcagatcttgtgataccggtagcatgtcaccatgtggtgttggtacaggcagtgcaggtagcatagggaatgccacatgaacatgacatgactggatccccccgaagaggagtgcacttctgagagagaatcgcaaacaaacactgtccctctgggctgcccaacttcacatgccagaagacccggcgctccgcacgttaactgctctgtaaggaaggcaaagcatcaggcaattagtgatgcatgaaggccaggcactcagttacgcacttggactcaagctgaattgagaagagttgattcatacattgtcacagtacacagaacgaagactcaagactcagaaggttgtggggtgaagtctccgggatgcttgcctctgcccttagttcaggctgggggcgccatggccgtgggcgcaggtagggtgcaggcgctgtgtagcgggttttccaatctctgtgtagccagcagttctgtcggtgtgagcagggccgcagcgcccgagccgcagttgtgattgctttatttccctggtgattaaaccttgtgccattctattcctgttaaatccgtagaaaatgagaaaatactcgacattttgggggaaacttgtaaatctgagccagtaaaagaagaaggttcggagctggagcagccctttgcccaggccacgagtagcgtggggccagacaggaagctggcggaggaagaggacctatttgagagctgcggccacccggaagaggaagaggaagaggaggaagacgatcaggaagaggagcaggaggaggagggagatttagctttggccagcagcagcaagtctgagtctccaagcactcggtgtcagtggagcgaggcagatgccccgttagcagtagtgaaaagggagccggcagatgcgcctggcggaggcactgggatggaccgcgagcctgtagggctagaggagccagttgaacagagtagcacggctgcccagctcccggaggccaccagccaggagctggtgcgagcgcccacggcagccctgagccctgagccccaagatagcaaagaagacgtgaagaagtttgcttttgacgcttgtaatgacgtccctgcgcctcctaaagagtcctcagccagtgagggcgctgatcagaaaatgaggtttgttgattctcagtcctagaccagacgctatctcctttcattgtcactaggatacatatgagctgttagagcctgcagtcggcagccactctgcccagctagctccttcaggcagcttcttatttattttgcactggttctgtaacctttccccccaccccctcaacctaccacagttgtttgctttttaattcttaattatttttagcccggcagaaacttaattaattcctgtgggtatgaaatcttaatgttagatcagatatccaaaacatgtttgccagggtgtccttcttgaggttaaatgccgggtaggtatgcagctttggcgggtccttagagctctgggatgtttcaattgctgcagcctccttgagtgacactgtctcttgtctctagttctgtggaggaggactcggatacaaaaaggctttcccgagaagagaagggtcgcagcagctgtggtaggaatttctgggttagtggcctttcgtctacaaccagagccacggatctgaagaacctgtttagcagatatgggaaggtggtgggtgctaaggttgtgacgaacgcccggagtcctggagctcgctgttatggctttgtcactatgtccacagctgaagaggcaacaaaatgcattagccatttgcacaagactgagctgcatggcaagatgatctcagtggaaaaggccaaaagtgagcccactggcaaaagagtgcctgacaggcgagatggggacagcaagaaggagaaggccagcaccagtgacagatctgcaaaccttaagagggaggagaaaggtgagagaaaagacgatgccaagaagacagatgatgggagcacagagaagagcaaagacgcagatgaccagaaacctgggccttcagagcgctcgcgaacgaccaagtcaggaagccgtggcactgagcgcactgtggtgatggacaagtccaaaggtgtgcctgtcatcagtgtgaaaacatctgggtctaaagagagagcctccaaaagtcaggaccggaagtcagccagccgggagaagcggtctgttgtgtcctttgacaaagttaaagagtctcgaaagtccagagactcagagtctcggagggaacgggagcgcagtgagcgggagcagaggctgcaggcccagtgggagcgggaggagcgagagcggctggagattgctcgtgagcgcttggcattccaccgccatcggctagagcgtgaacgcatggagcgggagcggctggagcgggagcggatgcatgtagaacaggagcggaggcgtgagcaagagcgcattcaccgagagcgagaggagcttcggcgtcagcaggagctgcgctatgaacaggagcgccggcctgctgtgcgcaggccctatgaagtggatggccggcgagatgatgcctattggccagaagctaaacgggctgctctggatgaccgttaccactcagacttcagccgccaggaccgctttcacgacttcgaccacagagacagaggccgttatcccaaccattctgtggataggagagaaggttcacggtcgatgatgggagacagagaaggacagcattaccctgaacgccatggaggacctgaacgccatggccgggactctcgagatggctggggctatggttcgaacaagagattgagtgaaggccgggggctgccccctcctcccaggcgtgactggggggagcatggccggcgacttgaagatgaccgggcatggcagggcacggctgatggaggcatgatggagcgtgatcataagaggtggcaaggtggtgagaggagcatgtctggccactcggggcctggtcacatgatgaaccgtggtggcatgtcagggcgaggcagttttgccccaggaggagcttctcgtggccatgtgatcccacgtggagggatgcaggccaggctttggaggacagagccggggaagcagacccagtgatgccccgcttcacccgccgctattgagcacctaagccacccaaccgtgaccttcaagtcctatcaggacttccctcccaccattgtacaaaggaattttttttttatctgctgccatattgtagcttgttacgatgtgaatttgttttcatttttgttcgtgttttgttttgttttgtttttgtaataaaggtgtttctgt

SEQ ID NO: 451 - DNA, 7382 bp, Mus musculus
ccccccgcgcagagcatccctgctgcagcgcagcaagacccggggctggcagccccaggaatccctagctgcttcgcagggataaaggactgaagttcttggaggagcgagtccaactcttcaagctgaactatgaccactttactcttggtctttgtgactctgagggtcatcgctgcagtgatctcagaagaagttccagaccatgacaactcactgagcgtgagcatccctcaaccatccccattgaaggtcctcctagggtcttccctcaccatcccctgctacttcatcgaccccatgcatcctgtgaccactgccccctccactgcccccctcaccccaagaatcaagtggagccgtgtttccaaggaaaaggaggtggtactgctggtggccactgaaggacaggttcgagtcaacagcatctaccaagacaaggtgtcgctccccaactatccagccatccccagcgatgctaccttggagatccagaaccttcgctccaatgactctgggatctaccgctgtgaagtgatgcacggcatcgaggacagcgaagccaccctggaggtcatagtgaaaggtattgtgttccactacagagctatttccacacgctacaccctggactttgatcgagcacagcgggcttgcctacagaacagcgccatcatcgccaccccagaacaactgcaggctgcctatgaggatggcttccaccagtgcgatgcaggctggctggctgaccagacagtcagataccccatccacacgccccgggaaggttgctatggtgacaaggacgagttccctggagtgagaacctacggaatccgggacaccaatgagacctatgatgtgtactgcttcgctgaggagatggagggtgaggtcttttatgcgacatccccagagaaattcaccttccaggaggcagccaacgagtgccggaggctgggggcacgcttggccaccacaggccagctctacctggcctggcagggcggtatggacatgtgcagcgctggctggctggcggaccgcagcgtgcgctaccccatctccaaggctcggcccaactgcgggggcaacctcctgggtgtaaggactgtctatctacacgccaaccagacaggctatcctgatccctcatcccgatatgacgccatctgttacacaggtgaagattttgtagacatcccagaaaacttcttcggggtgggtggtgaagacgacatcaccatccagacggtgacctggccagacctggagctgcccttgccccgtaatgtcacagagggagaggccctgggcagcgtgatcctcacggcaaagcccatctttgacctgtcccccactatctcagagccgggggaggccctcacacttgcccctgaagtggggagcacagccttcccagaggctgaggagagaactggagaagccaccagaccctggggctttcctgcagaagtcacacgtgggccggactctgccactgcctttgccagtgaggacctggtagtgcgagtgaccatctctccaggtgcagctgaagtccctggtcagccccacttgccagggggagttgtattccactatcgcccaggctccaccagatactctctgacatttgaggaggcacagcaggcctgcatgcacaccggggccatcattgcctctcctgagcagctccaagctgcctatgaggcaggctatgagcagtgtgatgctggctggctgcaggaccagaccgtcagataccccattgtgagcccacgaaccccatgtgtgggtgacaaagacagcagcccaggagtcaggacctaccgcgtgcgcccatcatcagaaacctatgatgtctactgctacgtggacaagcttgagggggaagtgttcttcgccacacgcctcgagcagttcaccttccaggaagcgcgggccttctgtgcggctcaaaatgccaccctggcctccaccggccagctctatgctgcctggagccagggtctggacaagtgctatgctggctggctggcagatggcaccctccgataccccatcatcacccctcggcctgcctgtggtggggacaaacctggcgtgagaactgtctacctctaccccaaccaaaccggcctccctgacccactgtcaaagcaccatgccttctgcttccgaggtgtgtcagtggcgccctctccaggagaagaagagggtagtacacccacatcaccctctgacatagaggactggatcgtcactcaggtggggcctggtgtggatgctgtccccttggagccaaagacaacagaagtgccatatttcaccactgagccaagaaaacagactgaatgggagccagcctacaccccagtgggcacatccccacagccagggatccctcccacatggcttcccaccctcccagcagcagaggaacacacagaaagcccctctgcctctgaagagccctctgcctcagcagtcccttccacctcagaggagccatacacatcttcatttgcagtgccgagcatgacagagctgccaggctctggggaggcgtcgggcgcacctgacctcagtggtgacttcacaggcagtggagatgcttcaggacgccttgactccagtgggcagccttcagggggcattgaaagtggccttccctcaggtgaccttgactccagtggcctcagccccacagtgagctcaggcctgcctgtagaaagtggttctgcctcaggagatggagaagtcccctggtcccatactcccacagttggcaggttgccctctggaggtgagagccccgaaggctctgcctctgcctctggaacaggagaccttagtgggctgccttcaggaggagaaattacagaaacttctacttctggggcagaagaaaccagtggacttccttctggaggagacggtctagaaacttctacctctggagtagatgatgtcagtggaattcctactggaagagaaggtctagagacttctgcctctggagtagaggacctcagtggacttccttctggagaagaaggttcagaaacatctacctctggaatagaggacatcagtgtacttccaactggaggagaaagtctagaaacctctgcttctggagtgggagacttgagtggacttccctcaggaggagaaagtctagaaacatctgcttcaggtgcagaggatgtcactcagcttcctactgaaagaggaggtctagagacttctgcctctggagtagaagacatcactgttcttcctactggaagagaaagtctagaaacttctgcctctggagtagaggatgtcagtggacttccttctggaagagaaggtctagagacttctgcctctggaatagaggacattagtgtgtttcctactgaagcagaaggtctggacacttctgcctctgggggatatgttagtgggattccttctggaggagatggtacagaaacctctgcttctggagtagaggatgtgagtggtcttccatctggaggagagggtctagaaacttctgcctctggagtggaagatcttggtccttctactagagatagtctagagacatctgcttcaggagtagatgttactgggtttccttctggaagaggggacccagagacctctgtttctggggtaggtgatgacttcagtggacttccttctggaaaagaaggcctggagacctcagcttctggagctgaggacctcagtggcttgccctctggaaaagaagacttggtagggtctgcttctggggccttggactttggcaaactacctcctggaactctaggaagtggtcaaactccagaagtaaatggctttccctctggatttagtggtgagtattctggagcagacattggaagtggcccatcctctggcctgcctgactttagtggacttccatctggctttccaactgtctcccttgtggacagtaccttagtggaagtgatcacagccaccacttccagtgaactggaaggaagggggaccattggcatcagtggttcaggagaagtatcagggctgcccctgggtgaattggacagtagtgcggacattagtggtctcccttcaggaactgaactcagtggccaagcatctggatctcctgatagcagtggagaaacatctggattttttgatgttagtggacagccatttgggtcttctggcgtcagcgaggaaacatctgggattcctgaaatcagtgggcagccatcagggactcctgacaccactgcgacatctggagtgactgagcttaatgaactgtcctctggacaaccagatgtcagtggagatgggtctggaattctctttggcagtggacagtcctctggtataacatctgtgagtggagaaacctctgggatttctgatctcagtgggcagccctcagggttcccagtgttcagtggaacagcaaccagaacccctgacctggcttctggcaccataagtggcagtggagagtcttctggcattacatttgtggacaccagttttgttgaagtgacccctaccacatttagggaagaagaagggttaggatctgtggaactcagtggctttccttctggggagacggaactgtctggcacatctgggacggtggacgtcagtgaacaatcttctggagcaattgattccagtggactcacatcccccactccagagttcagtggcctcccaagtggagtagctgaggtcagtggtgaattctctggagttgagactgggagcagcttgccctcaggagcatttgatggcagtggacttgtctcaggtttccccactgtgtctcttgtagacagaactttggtggaatctataactcaggctcctactgctcaagaagctggagaaggaccttcgggcattttggaattcagtggtgcccattctgggacaccagacatatctggggagctttctgggtctctggacctaagcacattgcagtctgggcagatggaaaccagcacggagacaccaagctctccatattttagtggagacttttccagcaccactgatgtaagtggagaatccatagctgccacaactggcagtggggaaagctctgggcttccggaagttactttaaacacctcagagttagtggagggtgtgactgaacccactgtttcccaggaacttggccatggtccttctatgacatacatctcccggctctctgaggccagtggggacgcctcagcatccggggaccttggtggcgctgtaacaaacttcccagggtctggagtagaagcttcagtcccagaagccagcagtgacctgtctgcttaccctgaggctggtgtgggagtgtctgctgcccctgaggccagcagtaaactgtctgagttcccagatctgcatggaatcacttctgccttccatgaaacagatctggaaatgacaaccccaagcacagaggtaaacagcaacccatggacctttcaggaaggcaccagggagggatcggccgctccggaagtgagtggagaatctagcactacctccgacatagacacaggcacttcaggggtgccttctgccacacccatggcttctggagacaggactgaaatcagcggagaatggtctgatcacacctcagaggtgaatgttgccatcagcagcaccatcacagagtccgagtgggcccagcctacccggtaccctacagagacacttcaagaaatcgaatccccaaatccctcatactcaggagaggagacccagacagcagaaacaaccatgtccctgacagatgcccccaccctctcttcttcagaagggtcaggggagacggagtcaaccgttgcagaccaggagcaatgtgaggaggggtggaccaagttccagggtcactgttaccgccactttcctgaccgagagacctgggtggatgcggagagacggtgtcgggagcagcagtcacatctgagcagcattgtcactcctgaggaacaggagttcgtcaacaaaaatgctcaagactaccagtggatcggtctgaatgacaggactatcgaaggggacttccgctggtctgacggacactctctgcaatttgagaagtggcgtccaaaccagcctgacaacttctttgccaccggagaggactgtgtggtgatgatctggcatgagagaggcgaatggaacgacgtcccctgcaattaccagctgcccttcacgtgtaaaaagggcaccgtggcctgtggagaccccccagtggtggagcatgctagaaccctcgggcagaagaaagatcgctacgagatcagctccctggtgcggtaccagtgcactgagggctttgtccagcgccacgtgcccaccatccggtgccagcccagcgggcactgggaagagcctcgaatcacctgcacagaccccaacacctacaagcacaggctacagaagcggacgatgagacccacacggaggagccgccccagcatggcccactgagaggagcttccataatgtgcccaggatgctgagcccagcggccagccaggctgaccgtgcatcccacccacatggtgtcttcttgtcgctttttgtcatataaggaatccattaaagaaggaaaaaaaacccacattgtgtgtgccccactccccgcatcacccaaactgcatctaatttatccccttctcccccccccccaaaaaaaaaaagaaaagaaatgcccaagcaagtcactgtaaccccgtggtacctcagctttgagacttttttgatttccccacccgtgccctttcccagggaccagtgcaggcacagggtgagaaggtaaggggttaaattaaataaagaagattcttttttgttgttgtttcctgactttgcccaagaacagtacaatggttggttacttcgcctccagggagagctaggggcccagaggaggagctgaaagaagacaggaccaggaagggaggagtagggcggtcacagagcttggaggactcagaagaggcaaagtacagcttagtgtgttggacaaaaggaattgaggtctgtgccatctgtgagggaaggacctggggcagggacaggctggctgaagagaagcagagccctctcctagggacctttcatctgggtcaaccaacctagcaggtgtcatttctcggctggactgggtaggggcacttccttcccaggggtctccgccgtccccttccctctccccaccccgggacggtgcaggcaccagtgttccgtgcacctatttatatttttgaaaactaaagattatgataattataataataaagacattggaagagatctaaaaaaaaaaaaaaaaaaaa

SEQ ID NO: 452 - DNA, 2380 bp, Mus musculus
gggcagtcccatctccagcctgtaacagccctagcaggcagaacatgagcctcttcctgcgaaagcgatgcctctgcctaggcttcctgctcttccatctcttaagtcaagtctctgcatctctgcgctgcccttctcggtgcccacccaagtgccccagtatatcaccgacctgcgcccccggggtgcgctcggtgctggacggctgctcctgctgtccggtgtgcgcccgccagcgcggggagagttgttctgagatgagaccctgtgaccagagcagtggtctctactgtgaccgcagcgcagaccccaacaaccagactggcatttgcatggttccagagggagacaactgtgtgttcgatggggtcatttaccgcaacggagagaagtttgagccgaactgtcagtacttctgcacctgcagagatgggcagattggctgtctgccccgctgccagctagacgtgctactgccgggtcctgactgcccagctccgagaaaagtcgcagtgccaggggagtgctgcgaaaagtggacctgtggctcagacgagcaggggacgcaggggacgctgggaggcttggcccttccagcctatagaccggaagccaccgtaggagttgaagtctctgactccagcattaactgcattgagcagacgacggagtggagcgcatgttccaagagctgtggaatgggcgtgtccacccgggtcaccaacaggaatcgccagtgtgagatggtaaaacagactcgtctctgcatcgttcggccttgtgaacaagagcccgaggaagtaacagacaagaaaggtaaaaagtgtctccgcaccaagaaatccctgaaagccatccacctacagttcgagaattgcactagcttgtacacctataagccccggttctgtggggtctgcagtgatggccgctgctgtaccccccacaacaccaaaaccatccaggtggagtttcagtgtctcccgggggaaatcatcaagaaaccagtcatggtcattggaacctgtacctgctactccaactgccctcagaacaatgaggccttcctccaagatctggagctgaagacaagcagaggagaaatttaacaggtgctcagggaagcatattggttgaggcaaatggttgctgcggcatggcccaccatctgtatataggaaacataatgaagttgtcccacgtatgttgctgtgatcatatgaggccatttatatttgtctttttttttttaatgaaagatgttccgaatgtaaacttagaatcaaggtaagctcaggatatggcttaaaggtgacttcctttcctgtgctgtttatcacaagagcaaatttatataaatttaagtcacataaatgatctagttagtagaatgtggtcacatcacattcattttctgtgcactagttaaatcccaataaatgttacagaaatgatggacacagtgaaatctaagatcatgttgaatatatatatatatatatatatatatatatatatatgtatatatatatatatatatatatatatatatatatatatatatataataccaaggttgacttgagggatctctactgagttccttgttggggtaggtcaacttgtgcttccaagtgtaagatcaaagaaaacatacatctcttgaacatgaagttcagagactgattttctacttagtgcaccaggaaatatgctatagttacagcagtagagtgtctcttaattacgtgggctagtgtcatgaactttctccattatagacaaaccgactcctttccaatagaaagaagctgaaccaaaaactcccaatgcagagatgacggggcctctcagctcatggtttgtaccccggaggctgctgaggcccacttcttcaaaattaaacagggactctttcatagttaaagtacactgaagaccaagccacctaatttacaatctctgatgattttcaaatgtgcttttagtgcaattttgaaaaggaagagcagaatctacaaaattttatgaaagtttaaagtagctgaagacctgctcaaaatacatcttttggtcatagttatgaaaacacaagttatacatgtgtacctatgtatgcttaataaacaaagttcacaaaatgtgctagaaaatacaatttgtacatcaccatacacatcccacttttctttttaaagtatttatgaaaatataaattatacattttgtaaaatattctctttaatttccctagttgttacaaacaacttttaaaaagtatgatgttatcagtgagtgactctggtattagttttgtgttatcagtttaatgctgtttactgaaaataaaaatccatgaattaaaaaaaaaaaaaaaaaa

SEQ ID NO: 453 - DNA, 1493 bp, Mus musculus
ggaacaatgtcctccacagagagagagacataaaggacacttgatcatacagtccttggaattatttccaggaaccacttacagaagccgttcgggagcacctttcccttggcagcacactcagggacagggacggcaaggaaatgagcacttctctgaattacaagtctttctccaaagagcagcagaccatggataacttggaaaagcaactgatctgtcccatctgcctagagatgttcacgaagcctgtggtcattctcccttgccagcacaacctgtgcaggaaatgtgccagtgacatcttccaggcctctaacccgtacttacccacaagaggaggcaccaccgtggcatcagggggccgcttccgctgtccctcctgcagacatgaggtggtgttagacagacatggggtctatggactgcagaggaacctgctcgtggaaaacattattgatatctacaagcaggaatccaccaggccagaaaaaaaattggaccagcccatgtgtgaagagcatgaagaggaacgcatcaacatctattgtctgaactgtgaagtgcccacctgttccttgtgcaaggtttttggcgcccataaggactgccaggtggctcccctgactcatgtgttccagaggcagaagtcagagctcagtgatggtattgctgtacttgtgggaagcaacgatagagtccagggtgtgatcagccagctggaggacacctgtaaaactattgaggagtgctgcagaaagcagaaacaggacctgtgtgagaaatttgatcacctatacggcatcctggaggagaggaagactgaaatgacccaagccatcactcgaacacaggaggagaaactggaacatgtccgaactcttatcaggaagtattccgatcacctggagaacgtatccaagttggtggagtcaggaatccagttcatggatgagcccgaaatggcagtatttctgcagaatgccaagaccctgttgcaaaagatcgtggaagcatcaaaggcgtttcagatggagaaactagaacaaggttatgagatcatgagcaacttcactgtcaatctcaatagagaagaaaaaattatccgtgaaattgacttttctagagaagaggaagaggaagaagatgcaggagaaatagatgaagaaggagaaggagaggatgcagtagaagtagaagaggcagaaaatgttcaaatagcatcttcaggggaagaggagagtctggagaaagctgcagagccctctcagcttcccgcagagcttcaggtcgccccagagccactacctgcttcctctccagaaccgttttcatccatgccacctgctgcagatgtcctggtgacacagattggatttgaggccccttctccccagggacagtctgcagccttggggagtgggggtggggctgatcctgagccagctcgccacgtcttctccttctcctggttgaattccctaaatgaataa

SEQ ID NO: 454 - DNA, 1940 bp, Mus musculus
  misc_feature (173)..(173): n is a, c, g, or t
ggcgcgagattgctggggctcctccgcggggatgaggacgctgaggaggcgccgagcagcgcaacgctgcgggggaggcgcccgcgccgacttggggctcatggccaggaccaccagccagctgtatgacgctgtgcccattcagtccagtgtggtgctatgttcctgcccanccccatcaatggtgaggtcccaaactgagcccggttcgtcccctggcattcctagtggtgttagcaggcagggatccaccatggatggcaccacagctgaagcccgaccaagcaccaaccccttgcagcagcaccctgcccagctgccaccacagcctcgcaagaaacgccctgaaaacttcaagtttgggaaaattcttggcgaaggctctttttcaacagttgttctggcccgagaactggccacttccagagaatatgctattaaaattctggagaaacgtcatattataaaagaaaacaaagttccgtatgtaactagagagagagatgtgatgtcacgcctggatcaccccttctttgtgaaactttattttacatttcaggacgacgaaaagctgtattttggccttagttatgccaaaaatggagagctacttaaatacatccgcaaaattggctcatttgatgagacctgtacccggttttacacggctgagattgtgtctgctttagagtacttgcatggcaagggcatcattcacagagaccttaaaccagaaaacattttgttaaatgaagacatgcacatccagatcacagattttggaacagcaaaagtgttatccccagagagcaaacaagccagggccaactcatttgtaggaacagcacagtatgtttctccagagctgctcacagagaagtcggcgtgtaaaagttcagacctttgggcccttggatgtataatctatcagctcgtggcaggactcccaccattcagagccgggaatgaatatcttatatttcagaagatcattaagctggaatatcatttcccagaaaaattcttccctaaggctagagatcttgtggaaaaactcttggttttagatgccacaaagcgtttaggctgtgaagagatggaagggtacgggcctctcaaagctcatccattctttgagaccatcacttgggagaatttgcaccagcagacacctccgaagctcacagcttacctaccagccatgtcagaggatgatgaagactgctatggcaactacgacaatctcctgagccagtttggcttcatgcaggtgtcatcctcctcctcttcccactccctgtctacggtggaaaccagcctgccccagaggtcgggcagcaacatagagcagtacatccatgatttggacactaactcttttgaactagacttacagttttcagaagatgaaaaaaggttgttattggaaaagcaagccggtggaaacccttggcaccagtttgtagaaaataatctaatattaaaaatgggtccagtggataagcgaaagggtttatttgcaagacgacgacagttattactcacagaagggccacatttatattatgttgatcctgtcaacaaggtcttgaaaggtgaaatcccatggtcacaagaactccgaccagaagccaagaattttaaaactttctttgtccacacgcctaacaggacgtactacctgatggatccaagcgggaatgctcacaagtggtgcagaaagatccaggaggtttggaggcagcagtaccagagcaatccagatgctgctgtgcagtgacgtggcctgcggccgggctgcctattgctgccaggatacctgccccagcgcggctcggccgccacccaggacgcttccagaccacctgccagccatctcgtggagaacatagatggcagaaatcttgcagcttttttatttaaaaaaaaaaaaaaaaaaa

SEQ ID NO: 455 - DNA, 4036 bp, Mus musculus
gttagagctcagcatcccggctcatccgagcagatcctccagtgatttctgctggccaaaaatttttaagatacattgaaaatatagcttgatttttgttttcacttatatattttttgttttgtatttttttctgcacaaagaaggagaattttttgttttcacttattcatgctgagaccaatttttgaaagccagctaaggcagcattgggcgtataggatttaagcctatagatagcccggctggaataaagaaaaaggaagataaaaggagagcacgctggtagaggattgcaccgtctaatcttgtaacctttaggaattgccgctaagaaaagagaatatagaattgtttgttttgaacagtttgttctacaaggtattttttgttgtttttctttgttgtttttttcctttttcttttttaatctctcccatccctaaaagctttatttaaaagcttgggatttgggaattttttggtgcaaaggtcttatttgtgtgtgtgtgtgtgtgtgtgtgtgtgtgtgtgtgtgtgtgtgttgtggtcgcagctgactcatcatgtctgccctgacgcctccgactgatatgccaacccccaccactgacaagatcacacaggctgccatggagaccatctacctttgcaaattccgagtgtctatggacggagaatggctctgccttcgggagctggatgacatctcccttacacccgacccagagccgacccatgaagatcccaattatctcatggctaacgaacgcatgaacctgatgaacatggcaaagctgagcatcaagggcttgattgaatcggctctgaatctggggcggaccctggactctgactacgcacctctccagcagtttttcgtggtgatggaacactgcctgaaacacggcttgaaagccaagaaaacttttcttggacaaaataaatccttctgggggcctctagagctggtggagaagcttgttccagaagctgcagaaataacagcgagtgtaaaagacctcccaggactcaagacaccagttggcagaggaagagcctggcttcggttggcattgatgcaaaagaagctttctgagtatatgaaagccttgatcaataagaaggaacttctcagtgagttctatgaagtcaatgccctcatgatggaagaagaaggagctattatcgctggtctcctggtgggtctgaatgtcatcgatgccaatttctgcatgaaaggagaagacctggactctcaggttggagttatagatttttcgatgtatctcaaagatggaaacagtagtaaaggtagtgaaggggatggacagattactgcgatcctagaccagaagaactatgtagaagaactcaacagacatctgaatgcaactgtaaacaaccttcagacaaaagtagatctgttagaaaaatccaacactaaattgacagaagaacttgccgttgccaacaacagaattattaccttacaagaagaaatggaacgagttaaagaagaaagctcctatctactggaatccaatcggaagggtcctaaacaagacagaactgcagaagggcaagcgctgagcgaagccagaaagcatctaaaggaggagacacagttaagattggatgtcgagaaggagctggagctgcagatcagcatgaggcaggagatggaactggctatgaagatgctggagaaggatgtctgtgagaagcaggatgccctggtgtctctgcggcagcagctggacgatctccgggctcttaagcatgagctcgcctttaaactgcagagttcagacctaggagtgaaacagaaaagtgaattaaacagtcgcttggaagaaaagaccaatcagatggctgccaccattaaacagctggagcaaagtgaaaaagatttggtgaaacaggcaaagaccttaaatagtgcagcaaataaactgatcccaaagcaccattaaacgttttgcagttggtcacctcacgaatctgatgttacagattgactctaaaaggaagaaatctgaaattcctacatttaagctctgattctatataaaatatcaccaaaagttgaccttgaatttgttggacttaaagaaacaataggtggatacataggtcgggtgttgttgttgtggttgctgctgtttttcccctcccgcacccccagagttagaattttggtatggattcctcgttaaataccaaataaactttgagaaatatttctgagttgaacagtaaatcaaaagaccgtttctaggaagcctgggggacggaagcactgtctgtgtgcttgcgagaaatagttctgtgtaggagggcctccgtccacaccagcgagcctgttctccgaagtgtaatggtgtacaggtgtcacctggtgacccgggactcttctaaagtagctctgtctcttaggccatgagccctcttctcttgacttctgtaggtttaatcaacccccagcccaagataagggtttagtatttcattacagttctgttttcagtaaccaagattgcttgcaggttatttctgccttagtgatgttggaatagaagaaaaacagcatccttacatttctttagaacgtagaaacaaagtagtgattaggtagctcttaacatcacagagtggaagcttgagaaacccctcttaacaccgccatcttctacctctgcccttctccgacatcccacttactacttaggtagctcagagagaacgtcaatagaaatccgacgttcacatctgccctgcagtcctgctggaatccctgaggccacagtggagtcctgcctgttgtcttcacctacagcacttgcccaagagctttgatcactttttctgtaatgagaatttgctaaatgttctgggaaactaatctagttaataaaattaaaaaaaaattccaaatgagaaataaataatacactggcattattgtttaatatcaaaataaagatcctcaatagccacgagcaatacgagcagggccttttctaagtgaccacagatgcaaccctttctaggctctacactgtaaataattctataaatactttgattttaaaaaagaactatttttgatttggggaggcaggcttttatatacatgagcctttactccgtccaacgatactcgcacgatgcccatgtagcatagcctgtgctaagagagaggcaaagggacccctctgcttccagctcttcaaaatctttaccttcttggcaaaccagaattaagagagcaccagagttcgtgggtttctataggtcctcaccaggcccgagttagagccaacttcatggagggtcccgtggccctgaactcatttgaattcttacaattttgcacctgcataaataaagcgcctactgcattctgccgttcatcagcctttaacggtgatgagtcgcttttcacctgagcatctaaaaagaagaatcaaatcaatcaaagttagactaaacatagcatgcctctaaattctactatagagagcctcaaatatttcaccttctaaaacatgattctttataggtgcaaagttataagacatttagaagaaagcatccatgagaatcttccagagaacatggtcaggagtcttaggaaccccagtgctgagttgtttgcttggtcacataccacctggtaggaatggaaaggaaggagacagccagacgttcacagagtgtccttgtggaggtgaagcctgggtaaggttgctacagcatgtcctccggcttcctgccgcacagggagactcaggaaacggtggtaaccccccgggagagggagctgctcctgcgtgctcctgctgtatgtagaagacagagtgttaggaaggaagccggtggcttcagcgtcaattactctgtacctgagggtggctctgggtatggatttccaaaagtgatgtcttgttgttgatcatctaatggctgtaaactgtagtactagaataaaaacaaaacaaaaaaataaaaaaaaaaaaaaaaaaaaaaaaaa

SEQ ID NO: 456 - DNA, 2356 bp, Mus musculus
ggactctcaagtgtctcctaagttgaacttattacaaactggtttgtcaacatcagttttagaaatgcctcatccagtgtcccaaagtacatttttagagatgaaagcgcatggtaatgtaacttgccaacgggataaaatgaaaggaattaaatctgaagaagttaaaattaataatattgcaattgaaattaataaagccacaaaaagggatcctggaaattgtaatttggataaccatattaaaccctctcctgactcatcattggataatcagatgaaactttcttgtgagtcagcaccagatcagaatttcagcatatgttcagcatctgaggtggagactaatccattagaaaacactgctgctgcctcaactcttctcagtcaagctaagattgatgaggacagaacatttccaggttcagctcctaatcagcagcacagtgtactcagtgatgaagcgtctatcaacagaaagaacagggatgtaccaccaaaccattctcagctgaagcatgattctcatttggagataacaattccaaagtccttgaaactgaaagactcagagaaagtggatgaaaaacagctggtcatagatgcaggacacaaacgatttggagcagtgtcctgtaatatctgtggaatgctctatacagcttcaaatccagaagatgaaacacagcacctgcttttccacaaccagtttataagcgctgtaaagtatgtggttctgctcattaatcaccacgagtgtggatctgaagaagagtttattacctctctttttttgagtatgtctaacttcagatacacacaacgtagcctccttccctattagattcttagaagggctggaaaaaggaaagaattcttgctgaatatcctgatggtagaataataatggttcttcctgaagacccaaagtatgccctgaaaaaggttgatgaaattagagagatggttgacaatgatctgggtttccaacaggctccattgatgtgctattccagaactaagacacttctctttatttctaatgacaaaaaagtagttggttgcctaattgcagaacatatccagtggggctatcgagttatagaagagaaacttccagttatcaggtcagaagaagaaaaagtccgatttgaaaggcaaaaagcctggtgctgctcaacattgccagagcctgcaatatgtgggatcagtcggatatgggtgttcagcatgatgcggcggaagaagatagcttctcgcatgattgaatgcctaaggagtaactttatttatggctcatatttgagtaaagaagaaattgctttctcagatcccactcctgacggaaagctgtttgcaacacagtactgtggcactggtcagtttctggtctataattttatcaatggacagaataccacctgatagaaatcttacttgttgtgccagaagacatcttttgaagagaaggaattggttgctgactttatccaggaactagggccattttttttacaaatgaactcaggactggcaacaaccatatggttgttccattttcataaaattggaaacaatgcagtaatagcttattattgttttgtttttttaaagaagatattttattatcttttacagaaatttatgattgtattttatctatagttatttagacatgtttacatgcagcacataattgttcatagtggactgaagattaatgcaaggactatggtctcattgataagtatattttgaagttcttaatatggaaatataccagtgtagcttggtactgtatttttttatattgatctgctgataccagttataggtttaaagattgtattttcaaaatgaaaaccagtgcttttgagttactattcaaagagggtacagtattacacacttaagaatttgaagttactaaagtgtactcttaagtataccccacagaaaaggagagctccaagtgaaaggacttgtataatagcaagtgtctccattgcttatgtttctgagactgatggtggaaaggtctctcctgtggggagccataaatgactagagtcacaaagaactacagaatagttgtaaactaaatgtggacggcttggtatctgcgttgttattcctcagaaatactgcactgagtatacgccctcattactggacttcatcttgatacttgtctgtccttcatagtgccctctacttttaaagggttatatgtcgaaaaactgctgtggccttttatgacctgtatataatgtagaataaaataataaaatacttgatagctttttttaagtgataaatgtaaaaaaaaaaaaaaaaaaaaaaaaaaaaaaaaaaa

SEQ ID NO: 457 - DNA, 3357 bp, Mus musculus
gtcggtgagccatggcggcggcagtggcggcagcggcagcaatgcggtcccggatcctgcaggtttcttctaaggtaaatgccacatggtatccagcatcctccttctcttcctcatcagtgccaactgtaaagctcttcattgatggaaaatttgttgaatcaaaaagtgataaatggattgacatccacaacccagccaccaatgaagttgttggtagggttcctcagtccaccaaagctgagatggacgcagccgttgagtcctgcaaacgtgctttccctgcgtgggcagacacatctattttaagccggcagcaggtcctgcttcgttatcagcagctcattaaagaaaacctgaaagaaattgccaggttaatcacactggaacaagggaagactcttgctgatgctgaaggagatgtattccgaggccttcaggtggttgagcatgcctgtagtgtgacatccctcatgctgggagagaccatgccatctatcaccaaagacatggacctttattcctaccgtctgcctctgggggtgtgtgcaggcattgcaccatttaattttcctgccatgatccccctttggatgtttcccatggctatggtttgtggaaatactttcctaatgaaaccatcagagcgagtacctggagcaactatgctccttgctaagttgcttcaggattctggggcccctgacggaacactgaacattatccatggacaacatgatgctgtaaactttatttgcgatcatccagacatcaaggcaatcagctttgtgggatccaaccaggcaggagagtacatcttcgaaagaggatcaagaaatggcaagagggttcaagccaatatgggagccaaaaaccatggagtagtcatgccagacgccaataaggaaaataccctcaaccagctggtcggggcagcattcggagctgctgggcagcgctgcatggctctttcaacagccatcctcgtaggggaggctaagaagtggctgccagaactggtcgatcgggccaaaaatctgcgagtcaatgcaggagaccagcctggagctgatcttggccccctgatcaccccccaggccaaagagagagtctgcaatctgatcgatagcggaacaaaagagggagcttccatccttctggatgggcgaagaattaaagtcaagggctatgaaaatggtaactttgttggaccaaccatcatctcaaatgttaagccaagtatgacttgttacaaagaggagatatttggtccagttcttgtggttttggagacagaaacactggatgaagcaatcaagattgtaaatgacaacccatatggaaatggaactgccatcttcaccaccaatggagccaccgcccggaaatatgctcacatggtggatgtgggacaggtgggtgtgaatgtccccattccagtgcctttgccgatgttttccttcaccggctctcgctcttccttcaggggagacaccaatttctatggcaaacagggcatccagttttacacgcagttaaagactatcacgtctcagtggaaagaagaagatgctacgctttcctcccctgctgtagtcatgcctaccatggggcgttagaagcaagttcttcaagactcagtccagcctgagtaatttcccatcactcttggcggccttcatgtgccatctttgctcaaaacagatctatgagaatggaatatattgcaactaaattctttctcagaactctcaatcccttcaaagttgtagggagtgcaggataacactaataccaggccttcattgttctccatatgtctccacagtttttaaggtaattgttgttaagtgtgaagtgtttgcctagaattcgagcttagaactgtcttctaactattcttttctgaacgtgagaggaatgtcaatgtagggacagatcttccaatcactgaaacagatcatcctccagttgagcctcaaatgcagccctccacgggtccccacactaacatgtaacctagttttacatatcttagcattgtgacgactgctctctgctcaatgccactttcttctgcgtgattcatagccactgtttaattctatcattgtccatgttcttgtgtcttaaaatacttctcaaggatacctcaggatgaagtgataagttagcttttagttacatgtgccattcttcatggtttgcctcgacaaccattaaatcaatactccagccattaatgcagatacaaatagatccttagataaaatctttccacaaatgattttgacccagaaatcaaaggatctcccatcatgaaagtgaatacactcttgccttaagtaggcttaacctattatttgccaaattttgttattcttcttttggcagtatttctcattagttgatactttttaatgaaagaactcttcatatggaataattgattaggctactagaaacatcaaagtttcatgctttgacagtatccagtcaccttattcaacttaaccagttattcagctgcctttaagcttgcttctctgataatctaaaccttcagtcagaagagactgatgtgctgaacagaacagtgtgtctgtctgacctgtctgaagcctgactttctaaactagatggctatggactctgcttaatctttagtgcttagtgaggtgtggcgctgtcattactgtgctctgttctgtatagccatgtgtggacagtgctgctccagtccattgtgggtttagtgagttaaaataaaaggtggtaaaaaaaacctggacattccctactctttggagctaagattattaaagtaaccagccctggcagaattcagagcttcagtcactttaacaaaacacaactctgattttcttttgttttccatcctaaagctaagtagacatttatactttgtgactgcaatgcattttgttttcttataaaacacagttcacattaatttaatccaacaattttgggctgggttgaaaagtggttattatctaaatccaagtagaatttaatcacagactcctaatattttccttagatataaaggaagttactttaaaaaaattacaactaatccaaattgtgttatttataatcataatcaacagatttgaccagctacttgtgctcaaaagggtttcttgtttcttagatgaaatttatatttggttgcatttgggttaatatcattaaatgagaaaaccagcattttccctttttgtccttatatgtctttgctgaattttgtgagcttctatactgattatgaataacaaagtacaaataaaaaagccttaggaaaaatacagtactgaaaaaaaaaaaaaaaaa

SEQ ID NO: 458 - DNA, 4991 bp, Mus musculus
aaaggccgggcagtgcgtgtggcatcccgacagaactggagaggagcaagtggcagtgctgggtgttgggaccgtggctgtcactgcgctggagcatccctgagcttttgaacagagccgactagtcagcagtgcagcagccgcaactccacgccgctctcatctgtctcgtgtctccgctcaggcgatccttcctccgagactccgcacaaagcacattttccaaagcagtgcaagggagcgcccagccgcgtgcaggcggacgcacccttcctgtcctttgttccggggggatctgctgctgctcttctccccaagtcggagtctttcctccaggggtggcgggtcgccgaatacagctacgaagatgccgttggaactgacccagagccgggtacagaagatctgggtgcccgtcgatcaccgaccctcgttgcccagatcctgtgggccgaagctgaccaactccccaaccgtgattgtgatggtggggctcccagcccggggtaagacttacatctccaagaagctgactcgctacctcaactggataggtgttccaacgaaagtgttcaatgtgggagagtatcggcgtgaggctgtgaagcagtacagctcttacaacttcttccgccctgacaatgaggaagccatgagagtccgaaaacagtgtgccttagctgccctgagagatgtcaaaagctacctgacaaaggaaggtggacagattgcagtttttgatgccaccaatacaactagagaaagaaggcacatgatccttaattttgccaaagaaaatgacttcaaggcatttttcatcgagtcggtctgtgacgaccctactgttgtggcctccaacatcatggaagttaaaatctccagcccggattacaaagactgcaactcagcagaagccatggacgacttcatgaagagaatcaattgctatgaagccagctaccagcctcttgaccctgataaatgtgacagggacttgtcactcatcaaagtgattgatgttggccggaggttcttggtgaacagagtgcaggaccacatccagagccgaattgtatactacctgatgaacatccacgtgcagccccgtaccatctacctgtgtcggcatggcgagaatgagtacaacttgcagggcaagattgggggcgactcaggcttgtccagcagaggcaagaagttcgccaatgccctgagcaagttcgtagaagaacagaatctgaaggacctccgtgtgtggaccagccagctgaaaagtaccattcagaccgcggaggccctgaggctcccctacgagcagtggaaggcactcaacgagatcgatgctggtgtgtgtgaggaactaacctatgaggagatcagagatacctaccctgaggagtacgcactgcgtgaacaggacaagtactactatcgctatcccacgggagagtcctaccaggatcttgtccaacgcctggagcctgtgatcatggaattagagcgccaagagaatgtattggtcatctgtcaccaggctgttctacgctgcctactagcctacttcctcgacaagagtgcagaggagatgccatacctgaaatgtccgctccacactgtcctgaaactgacacctgtggcatatgggtgccgggtggagtccatttacttgaatgtagaatcggtgagcacacaccgggagaggtcagaggatgcaaagaagggacctaacccgctcatgagacgcaatagtgtcaccccactagccagtcccgagcccaccaaaaagcctcgcatcaacagctttgaggagcgtgtggcttccacttctgctgccctgccaagctgcctgcccccggaagtgcccacgcagctgcccggacaaaacatgaagagctcccggagcggtgccgactcttcccagaagcactaaagccgagatgtgggttccattccatttccacagcctgccttgtgcctgctcatcttctcgaggccaagtgatcgcaaggacttctggactcgggagaatggaggtcggcatgttgaagagtagaagcccttccccccactgaaatgttggggtggcaaagacaactaggaagttgtacagatcccagcttcctgtgtagagcagcagaccttcctacgctctgttctctttcgacttccagggctgtctgacctctcaggcccttccaaagcttggggagggctatagttctagaggaggtgagatcagacccctaagtgggggccctggacaccgccacgctgttttgttttgtttctttggatcctggcctggcatgtcgatagtcagaagataagagtggcagggaaccctgagattcagagttagaccccacttgccagaggctcagggacaagttgcacattctcatgtggcttttatgcatcttggcctaggaggaggcctcagagacaagaggcttgggcattgctgcattgggtatgggatttctcctcctgaggaaaccttgagctgaggcctactggtcagctgagcaatgacttgccctgactcctctacaggtccacatgtcttctgggtcccaagttaagggacagactggttgtatcagtggaaggaaggatttttcagaaaaaaataaccagggctcccctcttcccagagtcccttaggccttctgttcttcaccttgggcctggaggcacctgagtagattctgttgttggctgtttgtttgcacttttccttctttctttccttccttccttccttccttccttccttccttccttccttcctccctccttccttctcttcttctctccttccttccctccctccccacacctcacttcaagaacctagggtgctggcccttggaggcttgcagcttctgaatgggaggagttggggtgtctttaagatggggagtctaagagccttcaacttcactcccattgttcaagaagggacggtggcccaaggaaggctcatgtcaggccgcctgctcagagctgtccgcatattttggccaagtgtctgctgctgtatgcctcataccaccatgctggccatcttgaggagtcacccccagtgtagaaaagcatccttgtcggctttatggcattggcgacatttttgcatgggttgaaaagtagcgctaatgtctttgtcttcctgtttctcccctttgtccacccatgttctgggggaggacgggacatcccaagcctggaagcaaccaatgggaaactcagcagtgtcagcccaaaggaccctttatgacgatgctgcacaactagggccgaaggtcactctttactttctgcttccttcctgggagtcctagggatcctctcttccccagctcaggggacaacagatcctggggtgacacagggcatgcttcagacactttaaagtcaccttgtgttttcatagctaactactcaaacatttggcccagcccactaccctttatatctgtggttcaccaggatatagatagatgatagatagaaagatagatagatagatagatagatagatagatagatagatagatagatagatgatagatatctccatctgaagacttggacttttttctctatggcttgagtcttgacaaggatatatgaactgcagacgtgggctgacatgtgtgcaggctgataatatttttggacctgaagatctgcagcgttgatttgggggatagggttgggggtggggtagggaacaggataagaactgtgtagcccaaactagcctcaaactcatggccgtcctcctgtctcagcctctcaaatgttagctgttcgggttataagcatgagccaccaccacaccacgcctggtactatggctttgtacctaaatgtggtttcttcgatgcttcctcctgaccatatccattttatggttatagaaccagcttttacaacatagagactctcaaggctgagacaggtaggggtggtcatgtgtgaccagcctaagtcaatacatcaagagaaagctttgcccaatgtgatttcacattctgtgaacacctatgaataagatcaggcccaggagatcttgatgcgggtggaacatgcatccttcaaaagccagtgacttggtggatggggtgggtagcacccatagaacttccactctcccacccaaaacagcaaaataaaatggggaccaatgtttttaacgttgcatatttgttttgggggtaaatttctcccctttccttcaacaatgggcactacccttgatttatggggagaagaaaaactgttggaaccacaccaatgatattttcatttgtaatacttgaagtttatttttttattattttgatagcagatgtgctatttatttatttaatatgtataagggagcctaaaactagaaagctgtctagattggctttaattgttcattggtttggggcctttcaatgtgtgactgatgacttcttcatgttctgtgtcattgtctctgtccgtgacctaggaagaagctttgcaagctttttaacaggacacgccttcctttcagacatctgtgtagtttgcagttgcaagaacaataaaaacctggttgagatacacctgcgggactcgcttctcaggtttttgcggagaacaagtgtcagttttctttctaagcatttagtgcgtggttgtgtgtgtgtgtgcgtgcgcatcagtgtgtgtgtgccagctcatacatgtgcacgggggttcacacatgtaggggtcagaggacagcttgacaggagtccatctctcccagcctccagagattgagcccaggcctccaggcttgtcagtgcctttacttgagtcaatcattttactggaccacagggtcttttattgagatttatggccagcgcatctctcagctccttgcagaaccctgttttatcttcctttaaataagaaacaacagattgtcaagtttgtatatttaggaaatataataaaatgtgttaatt

SEQ ID NO: 459 - DNA, 1042 bp, Mus musculus
aggtccgctgaaaaatggctgctgcatcggggtgcaatgcgcccgcgagcaggctgtagggcccttgccaccccgtccccgctgctcccttaccatgaggccgatgagtcgccgaagcctggactggacttactccctgttgctccttgcaatcgtcttgctctcttggggattcgtcatctatgcatcgactgtagctgcacgacgacaactacagaaggagtttccagacaagttcttctgaacgaacttttgtaattcttagcaaacacttcttttcttcagatggcacctatgtagactcaaagtaaaattcacaatacaaatttgcgtgtggccttttgtgataagcgttaacatgccaatttttcaaaatgatcggacaacaccccccccccccttttttttttttcgagacagggtttctctgtatagccctggctgtcctggaactcactttgtagaccaggctgaccttgaactcagaaatccgcctgcctctgcctcccgagtgctgggagtaaaggcgtgcgcccccacgcccggctctattttgtatcaggtcatagcttttcattctagtgctcaaacacttcacatcctcatgtcaaatcagtatgtaaacaacactgtgactaaaatgtgttttgcatcctgtttatcaaaatggacagaaaaaagtagctaatagctctgtttagtatttgtctttttactgttagtctcaaatcatagaacctttggacagtaacacggacagtgataacactctgagaataagctttattaattacttttccaggaaacagattcagtaaatacagcactttaggaacatacttgtgctgttacacaagtctgttaagtttttaaggactcttcaatgatgttgatcaggaaaatctctcattggtggaattacttctccagtctccagaattgtatcaccctagggaaaacaggaagtgtttaatagagatttttcaccaaatatacatttcattgtaaatattccaacatttgctcaacacaataaatgact

SEQ ID NO: 460 - DNA, 698 bp, Mus musculus
actcggagtaaacgcggctggcggtagtacgtgtgtctttttgctgagggcagttatgtttctccaatattacctcaacgagcagggcgatcgcgtttatacgctgaagaaatttgaccctatgggacaacagacttgctccgcccatcctgctcggttctccccagatgacaaatattcaagacaccgaatcaccatcaagaaacgcttcaaggtgctcatgacccagcaaccgcgtcctgtcctctgagggctcgttaatcttttacgctgctcatgcctcggcctattatcagcaaccaaacgcgtcaatctgtaagccttgaagccttcccatgctgtttggaatcctatctcactcaccacgtgaatgagtctatactgatgggcctcgcctgtaaaaggaacaatatttttctttctttttttcatgccaggttattaaagatatagtgaactgaaagttcattttgtgtgttgttggaggaagagatgggggaagggtagtaccgttggtagtacaaggccacttgagaacattcgtaagccctcattgtagcaatagaactgtgtgccatcgacgatagggtgttggggggaaaaaggctgtgaaagactcctacaaaggtcagcattccctggaaaactactgtctaattgtgggccctttaaaaaatattctgaattcctcaaagtgc

SEQ ID NO: 461 - DNA, 6352 bp, Mus musculus
gggggccgcgggcggggcgcggcggtccgccggcgcagcggcggagcggggctaagcatcctgcgccccggcgcggggccctgcggtagcctcgggtccctcccctggacctgccaccgagccagtgtgaaagacaggcgccgcagccatgaccacccacgtcactttggaagatgccctgtccaacgtggacctgctggaggaactgcccctcccagaccagcagccatgtatcgagcccccgccatcctccatcatgtaccaggctaactttgacacgaacttcgaggacaggaatgcatttgtcacgggcattgcaaggtacattgagcaggcaacggtccactccagcatgaatgaaatgctggaggagggccacgactatgcagtcatgctgtacacctggcgcagctgctcccgggccatcccgcaggtgaagtgcaatgagcagcccaatcgggtcgagatctacgagaagacggtggaggtgctggagccagaggtcaccaagctcatgaagttcatgtactttcagcgcaaggccatcgagcgcttctgtagcgaggtgaagcggctgtgtcacgctgagcgcaggaaggactttgtctctgaggcctacctgctgacgctgggcaagttcatcaacatgttcgcggtcttggacgagctaaagaacatgaagtgcagtgtcaagaatgaccactctgcctacaagagagcagcacagttcctaaggaagatggcggacccccagtccatccaggaatctcagaacctgtccatgttcctggccaatcacaacaggatcacccagtgtcttcaccagcaactggaagtgatcccgggctatgaggagctgctggcagacattgtcaacatctgtgttgattactatgagaataagatgtacctgacgcccagtgaaaagcacatgttgctcaaggtgatgggctttggtctctatctgatggacggaaatgtcagtaacatttacaaactggatgccaagaagagaatcaaccttagcaaaattgataagttttttaagcagctgcaggtggtaccccttttcggcgacatgcagatagagctggccagatacattaagaccagtgctcactatgaagagaacaagtccaagtggacatgcactcagagcagcatcagcccccagtacaacatctgtgagcagatggttcagatccgggatgatcacatccgcttcatctctgagctggctcgctacagcaacagcgaggtggtgacaggctcagggctggacagccagaagtcggatgaagagtaccgggagctttttgacctggccctgcgaggcctgcagcttctatccaagtggagtgcccatgtcatggaggtgtactcttggaagctggttcaccccacagacaagttctgcaacaaggactgcccgggcaccgcggaagagtacgagagagccacgcgctacaattataccagcgaggagaagtttgcctttgtggaggtgattgccatgatcaagggtttgcaggtgctcatgggaaggatggagagtgtcttcaaccaggccatccgcaacactatctacgcagccctgcaggatttcgcccaggtgacgctgcgggagccgttgcggcaagcagttcgaaagaaaaagaatgtccttatcagcgttctgcaagcaattcgaaagaccatctgtgactgggagggaggccgagagccccccaatgacccatgcttaagaggggagaaggaccccaaaggtggctttgacatcaaggtgccccgccgtgctgtgggtccatccagcacacagctgtacatggtgcgcaccatgcttgagtcactcatcgcagacaagagcggctccaagaagacgctcagaagcagcctggatggccctatcgtccttgccatagaggacttccacaagcagtccttctttttcacacacctgcttaacatcagcgaggctcttcagcagtgctgtgacctctcccagctctggttccgagaattcttcctggagttgaccatgggccggcgaatccagttcccgattgagatgtccatgccctggattctaacggaccatattctggaaaccaaagaaccttccatgatggagtatgtcctctaccccttggatctgtacaacgacagcgcctactatgccctcaccaaattcaaaaagcagttcctgtatgacgagatcgaagccgaggtaaacctgtgttttgatcagtttgtctacaagctggctgaccagatcttcgcctactacaaagccatggccggcagtgtcctgctggataaacgttttagagctgagtgtaagaactatggggtgatcataccgtacccgccatccaaccgctacgagacactgctgaagcagagacatgtccagctgttggggagatcaattgacttgaacagactcatcacccagcggatctctgctgccatgtacaagtccttggaccaggccatcagccgctttgagagtgaagacctgacctccattgtggagctggagtggctgctggagattaaccgactcacacaccgactcctctgtaagcacatgacgctagacagcttcgatgccatgttccgagaagccaatcataacgtgtctgccccttacggccgcatcaccctgcatgtcttctgggagctgaactttgactttctccccaactactgctataatggatccacaaaccgttttgtccgaactgccatccctttcacccaagaaccacaacgggataagcccgccaatgtccagccttattacctctatggatccaagcctctcaacattgcctacagccacatctatagctcctaccggaactttgtggggccccctcacttcaagaccatctgcagactgttgggctaccagggcatcgctgtggtcatggaggaactgctgaaaatcgtcaagagcttgctccaaggcaccatcctgcagtacgtgaagacgctcatagaggtgatgccgaaaatctgtcgtttgcctcggcacgagtacggctctccaggaatcctggagttcttccaccaccaactgaaggacatcatcgagtatgcagaactcaaaacagacgtgttccagagcctccgagaggtgggcaacgccatcctgttctgcctcctcatagagcaagctctgtctcaggaggaagtctgtgatttgctccatgctgcacccttccaaaacattctgccccgagtctacatcaaagagggggagcgcctggaagtccggatgaagcgcctcgaggccaagtacgccccacttcacctggttcccctgatagagcggctggggacgcctcagcaaatcgccatcgctcgggagggtgacctgctgaccaaggagcggctctgctgcggcctgtccatgtttgaggtcatcctgacccgaatccggagctacctgcaggaccccatctggaggggcccgccacccaccaatggcgtcatgcatgtggatgagtgtgtggagtttcaccggctgtggagtgccatgcagtttgtctactgtatccctgtggggaccaacgagttcacagctgagcagtgcttcggtgacggcttgaactgggccggctgctccatcattgtcttgctgggccagcagcggcgctttgacctgtttgacttctgttatcatctgctgaaggtgcagaggcaggacgggaaggatgagatcattaagaatgtgcctctgaagaagatggctgaccgcatcaggaagtaccagatcttgaacaatgaggtttttgccatcctgaacaagtacatgaagtctgtagagacagacagttccaccgtagagcatgtgcgctgcttccagcccccaatccaccagtcattggccaccacctgctaggtagaaaaccgtgcagaccttcaacctggaggaggaggaggaggaggagagaacacagtgaccagcctgcagcaggtccagttgacagtgtgtggacaggtctggaaggaaaagaaaacctccccaacacatctctaccactcccaagggctgggctcccgcatgttcctcccatgatatctccatggtggattttccatagtgtaaatgaaaaaaaaaacaacaaaaacacagggcagtgtgtgctttcttttctttttttccaccttatctgtattgaagagctactgtttccaccctgcagctgcccactccatctgcgattacttcccaagaccgcctccccaagtcgtaacctcctacccgctatctgtatttgatccagcactatagtcttagagacatagaagagaagagtgtagccatagcagagatatcagcctggcccattggatatctcagcttactggcccatcttctgtggcttctccctccagttccctcaccacagcacttcctgctcgtgacattagggattccaccaccaaaatctgatccctggtgaaccaggaagaggttgctgttgtcaagacaacagatgatgctgaccaagatcttttacagcctccctaagacccaccctagaccttccttacagaacagacctagagagaagaaagtaaggcttgcaaaaccacaccacactgggtggaactaggtgaagatgaccaggcctactgtgagggagagagagagtcatcagcacagggcaaaactccagatccaaaggataaatgttaggccttgttaacagcgtgggaagatgaggcactcctggtcctcaaacagaggcttagcactgagccacatgggaatccacatggtccgtcatagcgctacacatagcattcgtgagtgaccaagtcagtggctgcttaacacagaacctaatccaggaaaatcccccaagaaagaaaacctaaaggggttaccttaattggagacagggtggcaaggaggaaaaatatttttgtcaacaagcttcctatccccagacccctcccctcaaaaggaagtcttctttgagctaactggaatgttctcatgtcggctactaaaagattcttggaatgttcttttgctctcaatgtcctggtctctcccttttgctcaagctcagtcatggggatgtattaacttctatgtttcagactaaaacacccctgcacagtccccacaaatagcacatcttttaaagagattgcccaagtctccatatagagctagtcatctgacctgcagagaggacatagccctgagctcccaagacacaggaataatagatattcctctaccagcctggggaggacagaagacaggagtaaccatcccctgccccaggaaggtgattgttatccatcaccgtttttttaaccacacagagaagagaagagatgtgcataatctgtactttgccagacagggccatgtaccccagggtggtcatataaattagaatccttaaggatggcacaccagagtgttcctttctggacactaactttgaatctctgggaatagagccagaagacctgcctcttctcagatatatcactgcacaccacatactcagaccttgctgtagattggacaactctactaactctgggtctctctgagcaagagtaggagcatttgtagtgtagggttgtggtttgaaacagaaactgtccagtcctcctgtctggcactgttaattcttagtctgattatttttcaatgaccatagctgtatcccagaggcagattccactttccagatcgtcagctctggctggggatagaatgtgataaacagactttccccgcttagtgtcccctcactgctctgtagagatttgggctgttcataaggccgccttcctggcagctcatcccttctaccctgcactcctgaccccaacagttgaccctctgggaagagtcacattctgctcaagatatttgatcccaataaattgaggtcctcgctttgaggacagagattccatttttgcagcacttgcctgcaaactctggacaacttcaatgctctttcctctctagtggtccttgccccccacccctttgattttttttttaatgtatttaaagatcaagaaaaaagcttagattttaaaatgttttaaaaagaattctgtttcagaaattgtcaaatgtgtaccatatttgtattaagagttgttggggattttttgtacaatgaatttacatttatttatggtgaacttatatttacgcttgtgatcaaataatgatgttaaattcttaaatcctatttgctatgcagctgaagatgatattttgatttgtattttgggggtacctgtgttgagtcgataaaacattttcatctccattaaaactgcttccaaaccagtt

SEQ ID NO: 462 - DNA, 1783 bp, Mus musculus
ccacgcgtccgagcatggggactcctgcgggcgccgggacccgtcccacgggcgctggaactgttgaaggcgtggggatccctccgggcctgcagactgactacgagacgctgctcagccgcttccaagagatggacagcgtgcgcttcgaggacttcacggagctctggcgcagcatgaagttcgcgaccatcttctgtggcaaaatgaggaatttaaaaaagaacatgtttacaaaggaagctttagctttggcgtggcgctactttttgcctccacacacgttccagatcagagttggcgctttgtatcttctgtacgggttgtacaacacacagctgtgccagccgaaacaaaagatccgagttgccttgaaggactgggatgaagtcatcaggtttcagcaagacttgatgaacgcacagcatttcgacgcggcttttgttttcaggaagcttcggctggacagagccttccacttcacagctatgcccaagctgctttcgtgtagaatgaagaaaaaagttcaacaaactgaagtgacacagaaatttaaggacccgaatgatcgtgtaatgaaacttatcacttctgatgtattagaggaaatgctgaatgttcacgatcattatcaaaatatgaagcatgctatttcagcagacaagtccatgccagacagagctctcagtctggtaaaggaggacttttttgagaacattaagaacatagttttggagcatcaggagtggcacaaggaacggaagaatccctccttaaaacccaaacttaaagatggagaagagaacggtgaaggctcttcagaggagccagagagatgtgagagagctgtgtctttagcgaaaataaaagcgaaagccttttcagctgttgtcccggtgtccaagtccaggaggcatcgccagtccaagcttgactcttctgactctgactctgggtctggacaagtgcaaggcagagcagctaagagaaagagaaccagagaaccagcaggaccagcaggaaggaagagatcttccagaagcaaaggtaacgctccgaatgaacgtaaggaagagaagtcgttacacctgagtatgcctattattacagaggaggaggaggaggacatgggtggcgtcagaaaagcagagttcactgcgcccaagaggaagagaaaatgctgaaccgggaggctggtggagttttaaattttgagctttccaacagaagaaaggtgtcatgtgttctaagcaggaagtagccagtgaagactggatctgagaacaagctcatttctgtgagatggaagagcatgccataggccaagagttgagtaaaggtttactctgaagattaattttaacatttttgttaatattgcaattttaacaaattacattgtagtttgttacagaatagattgtaaatgtgttaaacttgttagacttgttaggggtctgtatgagtggagatagagtttctattgccttcagaatgtaatagaaagaattacatatttgtgagttagtactctttcctgaaagtttttgtgctgtactaatgcatttatatataaatgattcatacctgtcacctagcaacggatttggctggggtttttgttgaatattttgtgtgttatggttaagtgcaataaaaattttgcccccttgttttataaaaaaaaaaaaaaaaaaaaaaaaaaaaaaaaaaaaaaaaaaaaaaaaaaaaaaaaaaaaaaaaaaaaaaaaaaaaaaaaaaaaaaaaaaaaaaaaaaaaaaaa

SEQ ID NO: 463 - DNA, 5015 bp, Mus musculus
attcgcgttccgagacccacgggagcacgaagtttccgcgcaccgtctcacgcacggcgactgggaccgtccagtgtccggctttgccttcggtttttctccgttgtgactcgtgcaacgtgtggccagcggccacgcggaggcgacgaggagctgcacgtcaggacaaagtggggcagtcaacgtccaaacccgaaaacctagctaagtctgggttttcgccacaacaaagaagccaaccagagcatggtcttgggcttcaagtactaatgaacaacgatattaactcgtccgtggaaagccttaactcagcttgcaacatgcagtctgatactgatactgcaccacttcttgaggatggccagcatgccagcaaccagggagcagcatctagctcccggggacagccacaggcgtccccgaggcagaaaatgcaacgctcgcagcctgtgcacattctcaggcgccttcaggaggaagaccagcagttaagaactgcatctcttccggccatccccaacccatttccggagctcactggtgcggcccctgggagccctccttcggttgctcctagctccttacctcctcctccgagccagccacctgccaagcatttccctccaggctttcagctgtcgaaactcacccgtccaggtctgtggacaaagaccactgcgagattttcaaagaaacaacctaagaaccagtgtccaaccgacactgtgaatccagtggcacggatgcccacttcacagatggagaagctgaggctcagaaaggatgtcaaagtctttagtgaagatgggaccagcaaagtggtggagattctaaccgacatgacagccagggacctgtgccagctgctggtttacaaaagtcactgtgtggatgacaacagctggactctggtggaacaccacccacaactgggattagagaggtgcctggaggaccatgagatcgtggtccaagtggagagtaccatgccaagtgagagcaaattcttattcagaaagaattatgcgaagtacgagttctttaagaatccagtgaacttcttcccggatcagatggtcaattggtgccagcagtccaacggtggccaggcgcagcttctgcagaattttctgaacaccagcagctgccctgagatccaggggttcttgcaggtgaaagaggtaggacgcaagtcttggaagaagctgtatgtgtgcctgcgcagatctggcctctattactccaccaaggggacttcaaaagaacccagacacctgcagctgctggctgacctggaagaaagcagcatcttctacctgattgctggaaagaagcagtacaacgcgccgaatgaacatgggatgtgcatcaagccaaacaaagcgaagaccgagatgaaggagcttcgtctgctctgtgccgaagatgagcagatccgtacttgctggatgactgccttcagactgctcaagtacggaatgctcctgtaccaaaactatcgcatcccacagaggaagggtctgccccctcctttcaacgcacctatgcgcagtgtttctgagaattctcttgtggccatggatttttctggacaaatcggaagagtgatcgataacccggctgaagcccagagtgctgccctggaagagggccatgcctggcgtaagcggagcacacggatgaatatcctaagcagccaaagcccactgcatccttctaccctgaatgcagtgattcacaggactcagcattggttccatggacgtatctcccgcgaggagtctcacaggatcatcaagcaacaaggtctcgtggacgggctgttcctccttcgtgacagccagagtaatccaaaggcgttcgtactgacactgtgccatcaccagaagattaaaaacttccagatcttaccttgcgaggatgatgggcagaccttcttcactctggatgatgggaacaccaagttctccgatctgatccagctggtcgacttctaccagctcaacaaaggtgttctgccctgcaagctgaaacaccactgcatccgcgtggccttatgacctccttgcccactcacagaggctggaggcagcgacactggaacggagaagagagatctgcatgagggtgagaacacacacctactcccacccaaggactcagaacaacatggctttttgatcggtaccaaccgacctacatcaattagttattggacttcacaaagatttgccgctgtggatcaaacaggaccacctccctctgcgtcagccatttaaaattgggggagggaagagatccagtgcaagtgtgggaagaaactggaatgacgattttgattaggccacgtagggtgaaaaccgcagaaaaatgattggaaatgaactcttgccctggaataaccttgacaattcaaaccgcgatgtttactttttgtattgatcacttttttgcactccttcttcgttgtcgatgttgtactcagcctatggtaggagaggatgtggctttgcaactcagatcagacaaagaatttttgaattggcaggctttagcctacaaatgggtcccccaagttttctagataacatcctgctctctgcaggttgcggcagtgtgggtttggctccagtccttcccattatacttgaaaagctttttttttttttttaaataaaataataagataaaaggtgacaaccgcagttgacacctagcatgttttgtggacgcagtcaagctgccacagtctggtcatcgttgttgttgtgctgacgtctggtcatgtattattagtgtgtctcgttctccacggtgctggagacctcattactttggaaaactcactgttccccagcacagcacagctgcatgacctcagcttcagactgatgtcagccagccttcttggaacacattgctattcattgtggatgccacacagtccatctggggtgccctgtgcctcccattttcacagccgcccactgttgtagaataatcgctgcctttaccctctgcagtaccctcagtcatttcacttctcccacaggggtggggtaggggtggggttaaaggatcgaaagagaaaaaaacgccaacttgttggccttgtgctctgtcactctgagcatctatggtgataaagagaaggaaacgctgcagaggcacaagcataagctggctttgagtctttgaaagcttgatggcctctgcaccctactgaaaaccccctaagccagcaggagcagggtatgcagaggctttgcctctgctggcttagggtgagaagtacctcacaatggatgtgaacattggacagattttaggagcatgatgtttgcctcctccgagagagaggagtcagagagagagaggagtcagaaggtggccggagttatcattgggtcccctgagctccatgaaggaccctctgttgtccccttgatgatttatcaggcatgagagtagcagacaggattgccttgagaaacacacagacaacaacggtggtgaacacatttccctttcttgataccacccagaaagtctgctacatacctgagttagccactagattgcctgtcccgactcattgaagtgctccccagggagccacttctgatttgccatggttgacagcatagtggaagatagatatgacagcgctttgtaaagcaggccagtggcaagctggcccacagtagagaaacactgtagttcacagaccatgcaaccgtgtttccacgagatgttattacaacaaatgaagaatttttttccttttttttcattttaatcttttttgacttttttttagttaaccattttttatgcataagtgctcaaatgcatttctctttctttcgaaactagttaatcgttaagttgacaatgagagaattctcaagttcatacctggcagcaggctcccactgatcttccccttacagacagataacagacatttcagttttaccgtgctcatttctttctgctgacttaaggtcagaacttttccagacaacaaacaaccctagggtttctttttccagtttacacagaccggtccccacagtgcagaatccatttctctttcgtctcaacagtagacaactaggatgtggatctcatatttataagtatgcattttatttaagaggaagtataggcttgactctggttcacaatttcgtacgtagctggtttgacgtagaactttgtacttcccttgccgaagtgaattgttgaaggctgcaacccacccaccttgagtgtagcagacttcagtggccccgagatcgccagccctttgcacaggcagctgggaattccacctgaaacagctggtccctaggttagcgggttcccagcccccctaatcagagactgaaggacaattgacttttatttttgtatttaattgacatgaatgtaaaggggacagctcagggttgttttggagcctgtttgactttgtaatctctgcctgtgattttcttttctaaatgacgactccgtgtaaccacctggactaagttgagaaggaaactgccaaatgctttgggtttttagggttttaataggtagactctgttctattattaggtgttaagagtttccaaacgtgttttcttttttcttttattgtttgcttaaactttgaagaaatatgtgcctcagcttagatgttttgtcttcccctttctgcacttaaatacctgacagcctgttcgatcgctgtgcctccgagggcgcttctagctcatcgtagatttgtgatgtcatagtgcaaactgcagtgaccggtaaaatgacctgacatgtaaccgttttcagggaatgcagagggtgttaactaatagacaaaacctttatcccgcgtgctttgcttcaccttgtgctatatagctctttggctcgtgaacctaattgtaaactttcaggtatttttgtacaaataagggactgatgttctgtttcttgttattagaaataaacattaataaagcgtt

SEQ ID NO: 464 - DNA, 4654 bp, Mus musculus
gccagcttgccttccacccgacgcccagctgtcgcggccggagtggaaactgcgtgacgcgcggagagcgtggcggccattttcgtctcctgggcgcgtcagctgagcggcttggggcccgaagacaagcgccgcgcaagcgcacccacggcggcctcaggtaactcccatctgacgggagaggcgtcgccaccgccggaagtttggtgtttgtgccgcggggcggcgtcggccgccgcagaagcagctgagcgtctccgggtacccggatgtgaggcgacctgcgggctgcaggagaacccccggccgcgcagcaggaaggtgctgtataatgtgttaagaagaggctataaggaatggttttatcagattttcttgagttatggtggctgaaacatcagttctatcttgtgggaaaagaactaaatggcagcacaaaaggaaatctatattaatagagtactttactaagcgaaggagattaaatagaagccacaaaccaacaaacttggcaagcaaggaaagaaacctgttagccataagacatgttacaaattcatcaacatccagtagctgtagacttcagaagaaaaaacttttcagaaattttgtcaaagcagacaggtcagtgataaataactcctctagtaatagggttaggccggaaactaatcataattaaaacaaattggatctgaatgaagtttattttcattaaaaaaataaaaacttctgaaaacattaaattagaattttctgcagattttcatttccctatccagcagaaagcaagtatctttcaacattcatgccagcttttctcatgtcttagaaattgccaagagcaaaattacttgaaacaacctggtatttttgttggaaatgtacatcagtataagttaaagttgatttttaagatctactccttagtgacaatactaagtacttagcatctgtacctacctggacacagtcctcaaaaactcctcagaaagaaagacattactcaggaataatgtccattcaggagaaatcaaaagaaaattcctccatagttactaaagaaagtgaagatgagaatttagaagaagaagttgaaagttctcagaacagtccaacaaagaagtcaggctccaaggaagctgtaaagacaccagttagattttccaacaaaagtaaaacaaatgagtctgaatttggaatgcgaatgagtacaaggtcagcatcatgttcagctgataaaactgctactaactcctttaataaaaatacagtaactttgaagggacaatcacaagaatcttcaaaaacgaagaaattatgtcaggaaaaattatcacttggaatcttgaaagggaatgaacagcttcaccgcagatcacaaagactacagcagttaacagagtgtacaaccaggtctttgcgcagtagagagattcatggtcaaattcaaacagttaaacagaatcagcaatcagcaagaagagaacaatgtaacagtactcaaagtaaatgtaataaggttaaggtaaatcaaaagcatgtgaaaagaaaagtgcttgaaatcaagtctgattgtaaggaggacaggcattcagttacaaatgaagtaataaattctcccaaaggaaagaagcgcaaagtacagcatcagacaacttctacttgtagttctcagtgcaaccaagggtctgaaaaatgtctccagaagactagtagaaaagaagaaataaaacctgtgcctgtaactgctgatattagaaaattaaaagcagctacttcagtggtctctaaaaagaatgaactgaggaaatcagctcatacacaagtgagtactagcacaaaacgcccccaaatcccactgccactagtgcctgaacacagtgatgaccaggaattggagcaagctggaaagagcaaaagaggtagcattctccaactctgtgaagaaattgctggtgaaattgaatcagatactgtagaggtaaaaaaggaatcatcatgtgtggaaagtgtaaaggaggagaagcctgcagaggtaaaactgcaagggaccgatgctgaaagacaaatactccatcataaagaagccaaccaggatgtgcgctctaatcggttctttcccagtaggaaaacaaagcctgtgaaatgcgtactaaatggaataaatagctcaactaagaagaactccaactggactaaaattaagctttcaaaatttaactctgtgcagcaacataaattggactctcaagtgtctcctaagttgaacttattacaaactggtttgtcaacatcagttttagaaatgcctcatccagtgtcccaaagtacatttttagagatgaaagcgcatggtaatgtaacttgccaacgggataaaatgaaaggaattaaatctgaagaagttaaaattaataatattgcaattgaaattaataaagccacaaaaagggatcctggaaattgtaatttggataaccatattaaaccctctcctgactcatcattggataatcagatgaaactttcttgtgagtcagcaccagatcagaatttcagcatatgttcagcatctgaggtggagactaatccattagaaaacactgctgctgcctcaactcttctcagtcaagctaagattgatgaggacagaacatttccaggttcagctcctaatcagcagcacagtgtactcagtgatgaagcgtctatcaacagaaagaacagggatgtaccaccaaaccattctcagctgaagcatgattctcatttggagataacaattccaaagtccttgaaactgaaagactcagagaaagtggatgaaaaacagctggtcatagatgcaggacacaaacgatttggagcagtgtcctgtaatatctgtggaatgctctatacagcttcaaatccagaagatgaaacacagcacctgcttttccacaaccagtttataagcgctgtaaagtatgtggttctgctcattaatcaccacgagtgtggatctgaagaagagtttattacctctctttttttgagtatgtctaacttcagatacacacaacgtagcctccttccctattagattcttagaagggctggaaaaaggaaagaattcttgctgaatatcctgatggtagaataataatggttcttcctgaagacccaaagtatgccctgaaaaaggttgatgaaattagagagatggttgacaatgatctgggtttccaacaggctccattgatgtgctattccagaactaagacacttctctttatttctaatgacaaaaaagtagttggttgcctaattgcagaacatatccagtggggctatcgagttatagaagagaaacttccagttatcaggtcagaagaagaaaaagtccgatttgaaaggcaaaaagcctggtgctgctcaacattgccagagcctgcaatatgtgggatcagtcggatatgggtgttcagcatgatgcggcggaagaagatagcttctcgcatgattgaatgcctaaggagtaactttatttatggctcatatttgagtaaagaagaaattgctttctcagatcccactcctgacggaaagctgtttgcaacacagtactgtggcactggtcagtttctggtctataattttatcaatggacagaataccacctgatagaaatcttacttgttgtgccagaagacatcttttgaagagaaggaattggttgctgactttatccaggaactagggccattttttttacaaatgaactcaggactggcaacaaccatatggttgttccattttcataaaattggaaacaatgcagtaatagcttattattgttttgtttttttaaagaagatattttattatcttttacagaaatttatgattgtattttatctatagttatttagacatgtttacatgcagcagataattgttcatagtggactgaagattaatgcaaggactatggtctcattgataagtatattttgaagttcttaatatggaaatataccagtgtagcttggtactgtatttttttatattgatctgctgataccagttataggtttaaagattgtattttcaaaatgaaaaccagtgcttttgagttactattcaaagagggtacagtattacacacttaagaatttgaagttactaaagtgtactcttaagtataccccacagaaaaggagagctccaagtgaaaggacttgtataatagcaagtgtctccattgcttatgtttctgagactgatggtggaaaggtctctcctgtggggagccataaatgactagagtcacaaagaactacagaatagttgtaaactaaatgtggacggcttggtatctgcgttgttattcctcagaaatactgcactgagtatacgccctcattactggacttcatcttgatacttgtctgtccttcatagtgccctctacttttaaagggttatatgtcgaaaaactgctgtggccttttatgacctgtatataatgtagaataaaataataaaatacttgatagctttttctaagtgataaatgtacttgatacaatgttatattgaatgtttgtaccctttcagggagtttctttggtttgggactgaaataagattaaaacacaggcttctt

SEQ ID NO: 465 - DNA, 695 bp, Mus musculus
  misc_feature (4)..(4): n is a, c, g, or t
ggantttggccctcgagsccaagaatttcggcacgagggggtactaggtcagcaatcccatggcgtataaaagcatctcatctggccaggtcctggaacctttcctgagattctgccccaggatgccaactttgaataggatgaagactacaacttgttcccttctcatctgcatctccctgctccagctgatggtcccagtgaatactgatgagaccatagagattatcgtggagaataaggtcaaggaacttcttgccaatccagctaactatccctccactgtaacgaagactctctcttgcactagtgtcaagactatgaacagatgggcctcctgccctgctgggatgactgctactgggtgtgcttgtggctttgcctgtggatcttgggagatccagagtggagatacttgcaactgcctgtgcttactcgttgactggaccactgcccgctgctgccaactgtcctaagaatgaagaggtggagaacccagctttgatatgatgaatctaacaaaaactgcagtctcaatttggaaatctgactcatgtgcctttaaatgtgttcatattgcccatttaccctgcttcttgaaatgcttcttgaaaaataaagacaaatttgcatgtgaaaaaaaaaaaaaaaaaaaaaaaccatttgcggcsscaagcttattacctttagggggg

SEQ ID NO: 466 - DNA, 1392 bp, Mus musculus
cgctcagcgtggatctggccgcgcgagctgaccagtgatccggagactgccccgaagggagcgtaagctgcattcccggaggggcgggcggtacgggagccgcttccgggtgagccgccccgcccccacgtgggcttgcgcttttagagcgggagagcgcggtgtccagagcccggctcggagcggcggcgagcagcgtccttgagctgaggctgcagcagacacccaggagccgccactccatccagcagacttctctgtgttccactgccccgaccatgcaccaccagtctgttctgcacagcggctactttcacccactgcttcggagctggcagactgctgcctccaccgtcagtgcctccaacctcatctatcccatctttgtcacggatgttcctgatgatgtccagcctatcgccagcctcccaggagtggccaggtatggcgtaaaccagctagaagagatgctgagacctctggtggaagctggcctgcgctgtgtcctgatctttggcgtccccagcagagttcccaaggatgaacagggctctgcagctgactctgaggactccccaactattgaggctgtccgtctgctgaggaagaccttcccttccctcctagtggcctgtgacgtctgcttgtgcccctacacctcccatggccactgtggcctcctgagtgaaaatggagcattcctagcagaggagagccgacagcggttggcagaggtggcactggcctatgccaaggcaggctgtcaggttgtagctccgtcagacatgatggacggacgagttgaggccatcaaggctgccctgctaaaacatggacttggcaacagggtctctgtgatgagctatagtgccaaatttgcctcctgtttctacggtcctttccgggatgcagctcagtcaagcccagcttttggagaccgacgctgttatcagctgcctcctggtgcccgtggcctggccctccgagcagtggcccgagacattcaagaaggagctgacatgctcatggtgaagccgggattgccctacctggacatggtgcgagaggtgaaggacaagcaccccgagctccccctcgcagtataccaggtgtctggagagtttgccatgttgtggcacggagcccaggccggggcctttgatctcaggactgctgtactggagaccatgacggccttccgcagagccggtgccgacatcatcatcacctactttgcaccgcagctgttgaagtggctgaaggaagaatgaagaaaaagtgtcggacttgatcttgaccaagctccctgggccttacagaagggggaaagtaaatgcgctgttagaactgaaaaaaaaaaaaaaaaaaaaaaaaaaaaaaaaaaaaaaaaaa

SEQ ID NO: 467 - DNA, 2279 bp, Mus musculus
  misc_feature (1554)..(1554): n is a, c, g, or t
gcaccctgaaaaataaagttgtcatcagccccttccgccccgccccccgcccccccctccccaagcctcctgctgtagctcaacccagatcccctggagatagaatgtccagccccctcccacccaatccagagaacccgccttgtcccatcctgcggtgtctcattctggaagcggttgagccaagctgactcaggagacacattgccttccaactctgcactttcaagctctgcgtttctctccccgctccaactgctgggtttcctggctctaatccttgcctgagttacagcaaggaggacatttatcatgtttcttccatcctgaaaccaagttccccggcttgtggatgactctggctgccttgggggggtgagaggtacaggaaggggggtgtctcctctcctctaaaatccttaggaaactaaacttactcctctgtgcaggagtctggcagctccagacatttgcatgagaattcatgaaggagaaaaaaaaatccttgctaatgagcttttcccccccttcaaccaggattcctatttgtgctgtgagccaacgtcagcctgcacgtgcggtagagtcttgcacccagacttaaaagcccagtttgctgaagtgctggctttattgggcactatgaaactgatgtcagcaactgtaggactggggtgctttggaatctccttctaggcagtctgagtttaatccatcttcattggcaacactcttcaaagagcttgtcctgccttctggggtcccccttgatctttcttcctgaatgtgcatcacgctttgtagcccccccacccccaaccttgacctgctcagtacactcagacttgcatctttagcagtttggttgtttttttgtttttttttttaaactttctttcacttcattggcacttaattgtttttccttataagactttttggaggtcatcaacaaagaccataaactgatatcctagtgtgcttcctctgtgtgtgcgtgtgcgtgtgtgtgtgtgtgtctaacattccaaatactttttttcttttccactgtttgtaaagggcaacaaattaatatttcaaaggttgttttaatagttccttacaacccgaccttaaactacttctgtgcagtcccacacagtgccgacattagagagatgacattgctttgtcttctcagccgccatccttcctgagctgtttgctgctgcattgccacttcttcccctgtttcgcttctcttaagcagtttcaatatctttcattatagtcacaatattgccacggtttattataataagggggttttaatttgatttagagcattcaaagtgtttttcatcactttgtgtttatactataatccttgagtgtatgttgtgtgtatgtgtgcatgggtggttatgcgtgtgttcatagggtaatgccttcttgggactgtgttactgttctctcagtttattatgccatccaaatggtggacgagaacgctatgactgtagttagctcacaatttttaaataaaggataccacagtgaaaaaaaaaaaanaagagctcttggatccaagagctcttttttttttttttttcgagctttgacatggaaccttttttattttgtgataaaaatgttttcatataaatttcatcttaatctacttttagaatgaaactttaaaaagtaaaaacagtgtgcatattccttcctatatttagtcaggaacacgaagtcattttctggttactgagtttctcatacaaacagatataatgtcacttttcagggaaatatacacgaggaagttgccatagtaccaaaacagttaagggtgggggcctcaggacatagacacgtgtccttccaaacagtcctcgtacattcaacgcgctggttaaagtccgggtcctgaaatcacacgtgaacactgaacacctttggttcatttctatgcaagacttcaagtggccaagtttaacaaaatgatataaccaactcgtgctgacggctttcttgaaaatctttaactcagtctttctttccttcaatccccccaccatcgcataagtcagaaaattatgcttaaaacaaaaaagaacaaattaaaaaaaaatatccttaaaggcaggtaaaagtcaaaggaagatttcataggaataaaaaaaaaaaaaaaaaaaaaaaaatcccaaaacagggctctgtgtatggaataaaggatgtgcctcatacaacctcggcctcttgactcaggtcccggagtaagggactgcccatcc

SEQ ID NO: 468 - DNA, 2294 bp, Mus musculus
ggacgccggctctggctggagtggcggcggcatcggcggcggcggcgacggcggtggtagcggttgttcctccgaaggcgccacgcgctccgggacacacgtgggcggccgagagatggcgcgggagccgcgacgtggcgcgcagatcccgggacgcgggatggagcggtgcgagtgagcccgagcggccgcgcccggggcgatggccgtgccaccgctgctccgcggggcgctgctgctgtggcagctgctggcgacgggcggcgcggcgctggagatcggccgcttcgatccggagcgtggccgtggccccgcaccgtgccaagcgatggagatccccatgtgccggggcattggctacaacctgacccgcatgcccaacctactgggccacacgtcgcagggcgaggcggcggcgcactgtgccgagttctcgcccctcgtgcagtacggctgccacagccacctgcgcttcttcttctgctcgctctacgccccaatgtgcaccgaccaggtctccactcccatcccagcctgccggcccatgtgcgagcaggctcgcctgcgctgcgcccccatcatggagcaattcaatttcggctggcccgactcactcgactgtgcccggctccccacgcgcaacgacccgcacgcactctgtatggaggcacccgagaacgctacagcaggccccacagaaccccacaagggcctgggcatgctccctgtggcacctcggcccgcgaggccaccgggagattcagccccaggtcccggcagcggtggcacctgcgacaaccccgagaagttccagtacgtggagaagagtcgctcgtgcgctccgcgctgcgggccaggcgtcgaggtgttctggtctcggcgcgataaggacttcgcgctggtttggatggctgtgtggtccgcgttgtgtttcttctccacggccttcaccgtgttcaccttcctgctggagcctcaccggttccagtacccagagcgcccgattatcttcctttctatgtgctacaatgtctactccttggccttcctgatcagagcggtggcaggtgcacagagtgtggcatgcgaccaggaggcaggggctctgtatgtgatccaggagggtctggaaaacacaggctgcaccctggtcttcctgttgctctattatttcgggatggccagctcactttggtgggtggttttgactctaacctggttcctggctgcaggcaaaaaatggggccacgaggccatcgaggctcacggcagctacttccacatggcagcgtggggcctgccagcactcaaaactatcgtggtcctgactctgcgcaaggtggctggcgatgaactgactgggctctgctatgtagccagcatggacccggcagccctcactggctttgtgttggtacccctatcttgctacctggtactgggtaccagtttcctcctgaccggttttgtggctctcttccatatccgcaaaatcatgaagacgggaggcaccaatacggagaagctggagaagctgatggtcaaaatcggagtcttttccatcctttacacagtgccggccacctgcgtcattgtctgctacgtttatgaacgcctcaacatggacttctggcggcttcgggccacagagcaaccatgtactgctgccaccgtgcctggaggccggagagactgctcgctgccagggggctcggtgcccactgtggctgtcttcatgctcaaaatcttcatgtccttggtggtgggcatcaccagtggagtctgggtatggagttccaagacttttcagacttggcagagcctgtgctaccgaaaaatggcagctggccgagcccgggccaaggcctgccgaaccccagggggctatggccggggtacccactgccactacaaagcccccacggtggtcttgcacatgactaagacagacccctctctggagaaccccacacacccctagaacataggctaggctgtgagttatggttgctccctccttgccctcccctccccccttcagagacagctgactaacagctgcccagctgtcaaggtcagacaagtgagacacagggggctgaggactagggtggggacccagtaaagctcagggccttgaccttctgtctcatgcagggagtggtcctagtccacagagggtcccaggataagaaggggcagaagggggcagggtccagtgcagagttatttaatgatgtaatttattgtggcatttctctggaagctgtgactggaataaaccctcgtgtggc

SEQ ID NO: 469 - DNA, 3984 bp, Mus musculus
ctttctgggggagggggctcgggtgattcagcgccccggtcaggcggaagcggccgccgccgccgcggaggaggaggaggagaagaaaaaggaggggacagctgtccgcgcccgggcgcccgcggtggcacgagcccgcggccggagtgcgaggcggtaggcgaggaggccgcggggacgcgaggcgaggccggccggggccccgcagccatggagaacgctcacacaaagaccgtggaggaggtgctgggccacttcggggtcaacgagagcacggggctgagcttggagcaggtcaagaagctcaaggagagatggggctccaacgaattgccggctgaagaaggaaaaaccttgctggaacttgtgattgagcagtttgaagacttactagttagaattttactgctggcagcatgtatatctttcgttttggcttggttcgaggaaggggaagaaacgattacagcctttgtagagccgtttgtaattctgcttatcttggtagccaatgcaatcgtgggtgtgtggcaggaaagaaatgctgaaaatgcaatagaagctcttaaggaatatgagcctgaaatgggcaaagtgtatcgacaggacagaaagagtgtgcaacgaattaaagctaaagacatagttcctggtgatatagtggaaattgctgttggtgacaaagttcctgctgatattagattgacatccatcaagtctacaactctaagagtcgaccagtcaattcttacaggtgaatctgtctccgtcatcaagcatactgaccctgtccctgacccccgagctgttaatcaagacaaaaagaacatgctcttttctggtacaaacattgctgctgggaaagctatgggagtggtggtggcaactggagttaatactgagatcggcaagatccgggatgaaatggtggcaacagaacaggagagaacacccctacagcagaagctagacgagtttggggagcagctttccaaagttatctccctcatttgcattgcagtctggatcatcaacattgggcatttcaatgacccagttcatggtggctcctggatcaggggtgccatctactactttaagattgccgtggccctggctgttgccgcaatccctgagggtctgcctgctgtcatcaccacctgcttagctcttggaactcgtaggatggcaaagaaaaatgctatcgttcgaagtctgccttctgtggagacccttggttgtacttctgttatctgctcagataagacaggcacacttaccacaaaccagatgtccgtgtgcaggatgttcattctggacaaagtagaaggtgacacttgttcccttaatgagttcagcataactggatccacatatgcaccaattggagaagtgcaaaaggatgataagccagtgaagtgccatcagtatgacgggcttgtagagttagccaccatctgtgctctgtgtaatgactctgctttggattataatgaggcaaagggtgtgtatgagaaagttggagaagctaccgagactgctctcacgtgcctggtggagaagatgaatgtatttgatactgagctgaaggggctttctaaaatagagcgtgcaaacgcctgcaactcggtcataaagcagctgatgaagaaggagttcactctggagttttcacgggatagaaaatcaatgtccgtctattgtaccccaaacaagccaagccggacatccatgagcaagatgtttgtgaagggggctccagaaggtgtcatcgataggtgcacccacatccgagttggaagtaccaaggtccccatgactcctggtgtcaaacagaagattatgtctgtcattcgggagtggggcagtggcagcgacacgctacggtgcctggctctggccactcatgacaacccactgaagagagaggagatgcacctggaagactctgctaacttcatcaaatacgagaccaacctgactttcgtcggctgtgtgggcatgctggatcctcccaggattgaagtagcctcttctgtgaagctgtgccggcaagcaggcatccgggtcatcatgatcactggagacaacaaaggcaccgctgtggccatctgtcgccgcattggcatctttgggcaggatgaggatgtgacatcaaaggcttttacagggcgagagtttgatgaattaagcccttcagcccagagagatgcctgcttaaatgcccgctgttttgctcgagttgaaccttcccacaagtctaagattgttgagttccttcagtcctttgatgagatcacagctatgactggtgatggtgtgaatgatgctcctgctctgaagaaatctgaaatcgggattgccatgggctcagggactgcagtggctaagactgcttctgagatggtcctggcagatgacaacttctccaccattgtggctgctgttgaggaggggcgagccatctacaacaacatgaagcagttcatccgctacctcatctcatccaacgtgggggaagtggtctgtatcttcctgacggcagcccttgggtttcctgaggctttaattcctgtccagttactctgggtcaatctggtgacagatggtctgcctgccactgcgctggggttcaatcctccagacctggacatcatgaacaaacccccccggaacccaaaagaaccactgatcagcgggtggctctttttccgttacctggctattggctgttatgttggcgctgccaccgtgggtgctgctgcatggtggttcatcgctgctgacggcggtccaagagtctccttctaccagctgagtcatttcctacagtgtaaggaggacaacccagacttcgatggagtggattgtgcaatctttgagtccccatatccaatgacaatggcactttctgttctagtaaccatagagatgtgtaatgccctcaacagcttgtctgaaaaccagtctttgctgaggatgcccccctgggagaatatctggctcgtgggctccatctgcttgtccatgtcacttcacttcttgatcctctacgtggaacctttgccgctcattttccagatcacaccgctgaatctgacccagtggctgatggtgctgaaaatctccttgcctgtgatcctcatggatgagacgctcaagtttgtggcccgaaactacctggaacaacccgcaatactggagtaaccgcttcctaaaccatttgcagaaatataagggtgttcgggtgcgtgcatgtgcgttgttagcaacacatctaccagccctctgcatgactgaggttggggaaaagaaaaatagaaacagtccccaactcactgtgtgatgtggaggaaatgtgtattaccagtggggttttagctgttcaatcaaaataataacaaatgtacaatttagcataacaaatcagagagcctctccagagaagttggtttctttgctgcgagaaggaggttctgaaaccttatccaagaacagaagccatcagccaagtctccacatttctctgcaaaatgtcatagcctctctaactgtatgataattgtaatgcatgccttcagttgtaagtggccagattgctctacagtgacattgaaacatgctttctaatgggccctgtacagtttgcttatttataaattcatttaaaacactacagctgctgaatggttacaacataggcctccagtcctaacttcagttgtttaggtgtgcagccagctgttccacactgtattattgtaacttatttaatgaagtcagaagcagtagacagatgttggtgcaatacaagtattgtgtgcatttatcgtaataaagtgctcagcgtcagttcagttgctcacagcttctcacagcgcatgtttgactgtagtctgtaaatagaggtcagtttctgtgctggtaacaggtattgcacagacatgatttcaggtaaataaatctattctacgataaaccctc

SEQ ID NO: 470 - DNA, 1086 bp, Mus musculus
tggcttttgatcataaagagctcatcatttcaagtgtggacctatataaaaaacactggggacttgaggccacacaagctgcgatctctgcttcataaggctctggctatggatcagcatctccacatagcccagcagcccctactctcggggactccacaggaagatggttttgcaggaccctcagtagagttcgacaggatagaatcatctcttcgtagcatccagaaatttgttcctacagactatgccagctacacacaagagcattatcagttcgcaggcaagaagatcatcattcaagaatccattgagaactatggcacagtggtgtggccaggggctacagctctgtgtcaatatttagaagaccatacagaggaattaaatctccaagatgctaaaatacttgaaattggtgctggagcaggccttgtttccattgtatccagtcttttaggagctcaagtcacagcaacagacctgcctgatgttctaggaaatcttcaatacaatattttaaaaaacacactagaatgcacagctcatctacctgaagtgagagaactggtatggggggaagacctggagcagagcttccctaagtcaacctgttgttatgactacgtgctggcctctgatgttgtctaccaccactacttcctggacaagctgctcgctaccatggtgtacctttcccagccaggcactgtggtgctgtgggcaaacaaattcagatttagtgctgactatgaatttttaggtaagtttaagcaagcctttgataccactctcttggctgaatattcagaatcatctgtcaagctgtttaaagggatattaaagtgggagtgaaatgtgaagcgtctttcaaaccatcagtgtcttgtgaagatattcgaaggtgcaccatgccacactggtatggctaaaataaatgcaattcaatatacaactttctaagatgataagattatgtggtcaaagtatctatagaaagtaaatagatacatgactttccaatgtattaagcacttaaataagagtttatacaaagaagtaaataaacaggtgggttcctctgtt

SEQ ID NO: 471 - DNA, 4375 bp, Mus musculus
  misc_feature (3465)..(3465): n is a, c, g, or t
gaaaatgtgccaatgatgttctgagagcagcggacctgacatccaaggactgtagacgaaaggatctgtgctgactgaccccctttgctccagttgagttctaaggttctagtgtgttatggaaacacagagggcccgagttatccatcagaagcatgatgaaagaccatgggcccttctggagacagaactgcaaagtcacaggtagaggacatagacattcaaggggcagatatggatattaatgatgattctaacgatgaccatcttgcaagttatgacatccagctctgtattcaggaatccattgaagcgagccaggctatatttcatcctaaaagattggtacaactaagtgatcaaaacagaaagcttgtggaggccataaggcaaggtcgcatttttgagctccaggagtatgtgcaatataaatatgcactggaagaagcagatgagaaaggatggttcccattgcatgaagctgtagttcaacccattcaacagatacttgagacggttctggatgcatcctataagacactctgggagttcaagacctgtgatggagaaacacccttgaccctggcagtcaaagctggtctggtggaaaatgtcaagacgttgctagacaaaggggtctgggccaacaccaaaaatgacaaaggagagacacctcttctgattgctataaagaggggctcctatgacatggtctctgcactgattaaatacaacaccagccttgaccagccctgtgtcaaacgatggtcagcaatgcatgaggcagctaagcaaggtcgcaaagatattatcacgctgctattgaatcacagaggcaacgtccacttgagagacggattcggagtcacacccttaggagttgctgctgagtatggccactgtgacgtgttagaacatcttattcacaaaggtggtgatgtgtttgctttggcggatgatggggcatctgtgctattcgaggcagcaggaggaggaaaccctgactgcatctccctcctgctgaagtacggaggaagcggcaatgtgcccaacagagcagggcatcttcccatacaccgagctgcctatgagggacattatcttgctctgaaataccttatcccagtaacatccaaacatgcaattcagaaaagcggcctcactccaattcactcagcagcagagggacaaaacgcccagtgccttgaattgctcattgagaatggttttgatgttaatgccctgcttgccgaccacatttcccagagttacgatgatgagagaaagactgcgctatacttcgccgtctccaataatgatatccactgcacagaagtccttctggctgcaggtgcagaccccaacttggatcccctcaactgtctccttgtggcggtgagggccaatcgacatgaaatcgtccggctgcttctctcctatggggctaacgtcaattgttattttatgcatgtgaatgacactcgcttccccagtgccattcagtatgccctaaatgatgagattatgctgaggctcctgctgaataatggttaccaagtggagctatgttttgactgcatgcacggaaacatctttgggaattcatttgtgtggtcagagactgaggaggagggactgccagggtggacatcatgcataataaaagataatccgttctgtgagtttattacagttccgtggatgaagcacctggtgggcggcattgtccgcatactgatagattacatggattacgtccctctgtgtgcaaaactgaagtctgtgctagaagtacagagagaatggccagaaatacgccaaataatagagaatccttgctccctaaagcatctgtgccgattaaaaattcgccgagttatgggactgcagcgactctgccagccagcctccatacagatgcttcctctcccggcggcgatgcgaagatacttattatttaaagagtttgacctctacggacagtagctaaagttaatataactttaaaattatattttaaaatgtgattcttaaagcatttttttttaactgtgattcccctagagaagtcactggaatcattttgtattcttattttgtattcttaagtgtattttaacaccactgagaatctcgtagctatgtcgtgtccctatgggaagatcatgtacactcttaaagacttttaggctgctaagataagtaatatgctgtattttcatttctattgattgtcctcagttgttacgagtcttcatattctccctatcaactgaatatcaatattgagagtctaggcttaaaaggtaaataaccagtttctcaccaccaccacccctgccccacaaacatgccagctgctgccctacctattattagaacccctgctctagaagagctcatttatgcatgcagattcaccctgtaagccagcctctccagcgctccttggctcagtccctaacaacttccttgcggctaaattctataaacaactttcgctccccttcctgttgattcttgcggcactaactcagtttcctgttagtcctcaggttttaccatactgataggctgctcttttccctctccgtcctccccctcaacctccctgcctctgcttctctaggctgctcctcttcctgcaggcctctagagacaggtcctctgtccttttctgatacgctgtgttctctggaaaattccattcactagccttggttgtgatcagtctgctggggaccatgatgtttacagctgaagttcaactttttgtctcctatgcttcagacctgttcgacattgacgtaatacatttctaaacataaaggtatctgtagttcaacgcgtcctcaaatccttccttcacaaaacacttgtctcttacattctgcagttcagtactagcacaggcaattctgtttccaagtgaaaaagacttggcataagtctcgacacatacccccacccctattttctcacccagcatgccaactcagcaaatgccaccgagtttctctcttaaatccaccgtttcctgctcagtcccacaaattccactgtacatctgactgtgttcttcctcctactgagacaatacagtgccgcttccccgacttgctctcctagcctttctttttcccagttccttacagagtccacacacagcacttcagaatgaactttcagagactttaatatagctcattcccttgctgaaaatcactccctattattttgggataaacatctcaaattctcccaagacctccacgctttaactgccctacccatatcctctgtagcctatctgcatatcccctcccccttttggcaacgtcattgctacacatcttctacagcaattcccagactttatggttttataagaccagaggttttcattttattattattattattattattattattattattattatggtcctctttctaaaggantaccacctgttatcaacagttcagttttaaagggggtaagtccttaaaatgctagaaagcaagacatggtaagctcactcatttaaatggattgactttagttttgaaaagatggaccatgctattatctcttcactgacaagcaaaacttcactgtgctccacaagaatctgagtctcttagatgggaaccattgtgaacctcaggacctttacatttccttcaccctctccatctgaagcgctctttcctctcctttacgcctctctcccactgattagctgaccccttacgctgcggatcctgattcagctgttgcttcctccggatggaggtcactgcggacagccgctcacgtggtattgtagtactctatgtcacactagactggaagccccacgggggcaggatcgtgtctgctttatttcccagtatgtcgtcaaagccaaacacacgccctagaatgtgaatgttatataagaaccagactaaaataatcagtgacttggtggtaatatgataggttagagtttcgacttggtgtgtaaacccagtaatatacgtattaaaattgcttgttctttcatttttttgacatttttatcataagagtaaatattcttttggtagtaatatcttgtttgtaaattttgttagtttgtaaattttctgagttacatttactttcagttatctttgaaagataaataagtctggaaaaaaattatataatcaggattatggtttcaatgtatctccttgaggattttttaaaatacaaattataccataatgtatttaactcgaactgtcatgttttatgtacaatatatcataattcttgtgttgctttctttattgtgcctaaagtccttgcttataaatgttgctctaaataaataaaaaatag

SEQ ID NO: 472 - DNA, 3597 bp, Mus musculus
tgtacttagagagaatttgctgaggaaccaatcaaacaaattttggggctggagagattgctcagtggttaggaatgtttgctgctcttgcagaggaccttgcagtttggttcccagcactcattatcaggcagctgacactgcctgtgattccagtaccaagggatctgatctgacctgctgacctctgcaggtacccacacttgtgtgcacatacctacaaatagataaacatgagtaaaaataaagcaaatagctttttaaaagaaacaaattttgaatttttttttgtgtttatatatgtgtttcagttgagttatattgactgctgtctcatgtacatattgtttctagtattgattttaatatctactaactcattatgatgaatcttattggtataggaagctaatgtgagaaagtatttcatgtccatttgcaggtcttttgagaagacatcagctagccttttgcttgcatgatggttaatgataaagtttggtcacttccaccctttgctatgtcatggctaataagtctagtgttttcaggacccaggtccatggtgatctgtttaatgaagcacatactgacatttctttatatcacattaattctttgtagtataccgggcacttttgaataatttatcagtaatttaatttgtctgactactcattattatgttctgacaagatcagtatttttttaaatctactatttatcatcatcacatcacatcacatcacatcacatcacatcacatcacatcacattctttgaacaggctgaccagtgagcccttggcatctgtctgtttccttccccaatactggggatccaggcatgagtagccccacttttttttggtggggatttgaactcaggcctccatatttacaaagcagatataaaccatttttctgttggttactggtaaaactcttaattgctgacacagtatctaaatggctgctgtgatttaaggagaaaaagatattttgccaggtgttgttgggcatgtctatgatcccccactacctgtgagtgatggggggggggggagaggggtagttcaagtatgtttatagcaaattccaggtcagcttgggctgcaggaaccctttcaaaaaaaagaaaaaagataagtccttaattataaattactgacaatgtcaagataagtatagtgctgtgataaaaggtgtgctatttactaactaatctcttaagtttttgtactgcaaggtcatttggattccagtgattattatggtttggatattagtatttgtatgaattttacattaaaagtattactttgttccatagggtcaggagaaatatggactgttaaatgtaacaaaaattactgaaaatgggaaaaaagttcgcagaaagaactggttgtcttcttgggcagtgctgcagggttcgtctttactttttacgaaaactcaaggaagtagtacaagctggtttgggagtaatcagtccaaaccagaattcacagtggacctgaagggggcagtgattgaaatggcatcaaaggacaaatcgagcaagaagaatgtatttgaggtaaataactcacattcttggctttagggtgtacatgtttcagggttttgttgtgacaaatttaggcaaagtttgtgactaagtcatttgtaccattatgttgtaagggcactggtatgtgttgtggggagaggtatctaatgccttcttaatgtctctgtggccctagaactattttacagcaatgaagtctctcctccttgtcattccaaaccttccacaacagtttgtgatctgtatcagtttttttatcagtatataataactcatatataactttagagctcagcagctttgtaggagagaatggctgctctgctctcacctggggaccagtcatgagtctcagatggagtgggtagttggactgactcattttacccacatgtcctatattggctcatggataggcttccttcttcctaagatctctcttgttttacccaagaagctaacaccggcttctccacatggcaagttacacactagcacagggtgagagatgacagggcttctcaaggcctagtcttggaagctgaccaccctccatgtactctgttgtagcacagctcagaggcctcgctcacattcagggtcctgagaagtgagagtccacctgggtcagagaggagtaaagtccattgcagaaagttgggggcatttttgagatgtgtttgttttctgccttcttttccccattctttatagcctcatgtcctaggcactttggccttgccagtgctttccaagcagaatctacatgattatttctctttactgtcctaccttatgttccaacccacactaagctctgctccccaaattctgtttatcgctaagactcaggacaaatgctactacagtgatgctacttatagtggttaactttgttctgctcttaggaaactcttttatttttgatcaggaaaccctcccttgtctataacagcatacatttagtgttgggggttggctggaccatcttgtctagaaagatgcatgaaaggatgccattacttcccaaatcagctttgcagtttcagtagctggttcctgaatgagaaaagaatccatgatcaaatgcattttggaatagtatgtgttttatccctattttagacaatttcagtattctctagactgtcaaactcctgagaaatctcaaaggagagtgtcttctttgacctgatgcttttcaggttaatatttcatcatatcttaccttttttttttttttgaggaatagccttaccaaatagtacttaggaaattatggggtaattgattgtttgggagaaaattgccaaatgttcttctagaaaaacaaactcagttaatcagccaggaaaggagagggatgttttcataacttacagttctttcattgaagtgtaaaaaaaaacaaaaacaaaaacatgtagtccaaagagattaagttggttttgggtttcatgtaaaataatagatattcttacatcagttcatgattagatagttactaatgtttatgttcagaaggggtatgaaggttggtgggttagctcaacagttaaaggcatttcctgccaggcttgggttcagttcctgggattaacatggaggaggagagaattgactagttgtcctctgacatccatagtcaggccatggtgtacatgtgaacacacacacacacaaacacacactaaataaatgaattaagttaatagatgtataaacattttaaagggatgtaacattgtcatttgtgccttgtcttcatagtcatcattgtctggtaagtaggaaatactgaaaacttaacacttaaacagtcattcatatatattaagaattaagaaaattctcaggctatgaaaaaattcttaaggtgtgtgaaatacaacagacttttatttctttacaaatgttccagttttcattgtctgcattgcttttacacttgaatttatttttaaatgataaactatactactctaggatccagaattactagatttttctttagaatttacc

SEQ ID NO: 473 - DNA, 1706 bp, Mus musculus
ggtctaagattccggacgctggtcgctgggtgatctctgctcgccggcttggccctgagattgccaccggttctgcgcgttctcccgttgggtttggcgctttctccctgcttggagagagcaccaccgcgctgtgcggcagtccctggacgcagacaatggaggcggcgctggcagtgacccggctgcccccaaacgacccgaggacgccagcactgtcggtggtggacatgcacacaggcggcgagcctctgcgcatcgtgcacgccgggtgtccggaggtggcagggcccacgttgctggccaagcgtcgctacatgcgtcaacacctcgactacatccggcggcggctcgtgttcgagccccgcggccaccgggacatgtacggggccatcctggtgcccagtgagctgccagacgcacacctaggcgtcctgttcttgcacaacgaaggctacagctccatgtgcggtcacgcggtgctagcgctgggccgcttcgcgctcgactttggactggtgcccgctcccccaaaaggcgcccgggaggctcaggtcaacatccactgcccgtgtggtctggtgaccgccttcgtagagtgtgaaggtggccgcagttgcggccctgtgcgcttccacagcgtcccagcctttgtcctggcctcagacctcacagtggatgttcctggccatggaaaggtgctggtggacattgcatatggtggggcattttatgcgtttgttagtgcagaaaaattaggacttgatgtgtgttctgcgaagacgagggaccttgtggatgcggcaagtgcattgacaggagcagtgaaagcacagtttaaaatcaaccatcctgagagtgaagaccttggttttttgtatggatccatcttgacggatggaaaagatgcttatagtgaggaggccaccaccaacatctgcgtgtttgccgatgaacaggttgacagaagccccaccggctcgggagtgacagccagaattgctctgcagtatcataaggggctcctgcagctgaaccagaccagagccttcaaaagcagcgcaactggctcggtgttcacaggctgtgccgtgagggaagcaaagtgtggagatttcaaagctgtcatagtggaagttgcaggacaagcccattacacagggacagcaaacttgacagtggaagatggtgacccactaagggatggctttcttctcaagtgacttttttttttcataagttttaaaggttttgcttagaaagtaattacctttaaattgtgttttctctgtattatgtgcaaaccagtatccagttacacttacaggctaatttttatactttctaaaaagtatgtttagtatactgagtctaaatgtaaggtattatacttcctatttgtcaaccttttgagcataaatgtcgctaatggggcaaacagagtgccaagaatccggaaacttttaaagcattagtatacaaggcaaaattaaagcacagttacttaatctatgctatggaaatgataatacttgtaagttttttttgattgctagcttcagctataaaccacacaatagtaaatgttgtgagtttgttattttaatgttccagtttgagtaaaataaaggcatctgtaagtatcatgctcatagaggtgggttattataatgttctcaacacttgccataaataattttggaagg

SEQ ID NO: 474 - DNA, 1348 bp, Mus musculus
tagacacactagtactgcccgggagtgaattttagagaaagacttgagggatcaagccagcctatgaaagaaaacagccctggagccatcgagctgagccagctgagtcctgcagtattccccatggcctgcctgagtccctcacaactcaagaagttccaggaggacgggtttctgctgttggaaggattcttcacagcggatgagtgtgtggccatgcagcagaggatcggtgagattgtagctgagatggatgtccctctgcactgccggacagaattttccacccaggaagatgagcaacttcaaacccagggcaagacagactacttcttgagcagcggtgacaagatccgattcttctttgaaaaaggcgtttttgatgagaaaggaaatttcttggtccctcctgagaaatctatcaacaaaattggccatgctctgcatgcccatgaccctgtcttcaggagcatcacacattctcccaaggtgcaggctttggttagaagtctgggcctccagatgccagtggtggtgcagagcatgtatatctttaagcaacctcactttggcggcgaagtctcccctcaccaggatgctaccttcctctacacggagcccctaggccgagtgttgggcctgtggattgcgatggaggatgccatgctggagaacggttgcctctggttcatccctggctcccatacccgtggggtgtcaagaaggatgattcgagccccttcagactctgggcctggcaccagcttcctcgggtcagatccagcctgggctagcaacctctttgtgcctttgccagtgaggagagggggtctggttctgatccatggagaagtggtgcataagagtgagcagaaccattccgaccactcccgccaggcctacactgtccacctcatggaggctgccggcactgtctggagcccagggaattggctccagcccacgcccgagctgcccttcccaccactctacagctaaaggccctggcaggacagggcaggtccccaagggatgctgacaacaccaggctatctggctgcaactcaagggcacgtcttcctctatgggctttctttctgatggtgtctgtgaccttggtccagcagacagggagccaagaagtaaaaatgagggcaggagcccaggctgcacaagggtcttcttccaaaattttctctctatatacctttctgtcccaacccagctttctgaagtggctgcttaaccatgcaaggattgtgtttgagtctcacttttctcttggatggatgttactgtgtaaggcactgaataaaaacgacttaaaatataaaaaaaaaaaaaaaaa

SEQ ID NO: 475 - DNA, 3007 bp, Mus musculus
ggagctgaactgcagcgccgcccggagcttcaagcaccatgtatgacccagagcgccgctggagcctgtcgtttgcaggctgcggcttcctgggcttctaccacgtcggggctacgctatgtctgagcgagcgcgccccgcacctcctccgcgatgcgcgcactttctttggctgctcggccggtgcactgcacgcggtcaccttcgtgtgcagtctccctctcggccgtataatggagatcctcatggacctcgtgcggaaagccaggagccgcaacatcggcaccctccacccgttcttcaacattaacaagtgcatcagagacgggctccaggagagcctcccagacaatgtccaccaggtcatttctggcaaggttcacatctcactcaccagggtgtcggatggggagaacgtgctggtgtctgagttccattccaaagacgaagtcgtggatgccctggtgtgttcctgcttcattcccctcttctctggcctaatccctccttccttccgaggcgagcggtacgtggacggaggagtgagcgacaacgtccctgtgctggatgccaaaaccaccatcacggtgtcacctttctacggtgagcatgacatctgccccaaagtcaagtccaccaacttcttccacgtgaatatcaccaacctcagcctccgcctctgcactgggaacctccaacttctgaccagagcgctcttcccgtctgatgtgaaggtgatgggagagctgtgctatcaagggtacctggacgccttccggttcctggaggagaatggcatctgtaacgggccacagcgcagcctgagtctgtccttggtggcgccagaagcctgcttggaaaatggcaaacttgtgggagacaaggtgccagtcagcctatgctttacagatgagaacatctgggagacactgtcccccgagctcagcacagctctgagtgaagcgattaaggacagggagggctacctgagcaaagtctgcaacctcctgcccgtcaggatcctgtcctacatcatgctgccctgcagtctgcccgtggagtcggctatcgctgcagtccacaggctggtgacatggctccctgatatccaggatgatatccagtggctacaatgggcgacatcccaggtttgtgcccgaatgacgatgtgcctgctcccctctaccagatcccgagcatccaaggatgaccatcgaatgctcaagcatggccatcacccatctccccacaagcctcaaggcaactctgctggtttgtaaattgctggtctccgtgcttccagtgaacttggacattcttctcatggttggtccaggagaggccaaagctgagggcaccctgccttccacccccagtccagcttgaccttttatctggagcaacagtgtctagatgatgggtgggtgaggggtgctatactgtctgtccctctgggaagggttctgttacttttggaggcagctaggaagtttctctgtgcagctgccccctggtgctgtgtggtgacctcattgcctgtgaccccaggatcacaggatctgggctaaagtggtagtccatagaaaccaaagacaatgatttggtgtttagaaagctactcttggtctgggtgaagtctggtgcttaagggctatcacaaagagcgtgtcaaaccatctctcagcctgtgagtcagtggggagcccaagggcatcagtgtttggaaactggaatccaaaccgggcaatctcggaaggaaactgtttaggaattgtgatgggacgggccgtggctgtctctgaaaagggcctgccagataacttattacttttaaggacacctttggctcttactactttataaagcattttatataaacacaccagggagtgcatggtgaactacacgtatgatcagttaagtggggctagaattaggtagggagagcatcggacctctgcctcctcaacctcaacttgcttgctttctccactggctccaaatctttgtatagtcatcagccatgaccacctctctccctccccatctactaccagcagcgttaatgggaataagtacccacttctctcaggtgtactatacagctgtgggtgtggtgtgtgtttcctgtaattcacactttagaaaggaaacaagcaaacaaaagaaaccaggtgctgcccatagtcctaagtgtagacagtgaaggtgtgtgtctcccatgcctgagtctcctggaggcctagtgagctccaggttcatgcaagcacatcaggaggaatcatataatctcagcacggttgatccagatgggataagaaaggactctcggagagagaatgtggttctagagacaaagtgtctaggctacacagaagataagactgtcccaaggaaagaaaagaaaccaggaactagggtgcagctcagttgtcagaggaattctctaggcttgaagcccagagtccaatctcagcaccttataaactgtggagtgacaggcagtgacatcggcctgtaatcccaacactcaagcagtagaggcaagaggatcataagttcaaggtcttccttggctatttagggagttggaggttagctctggctacatgagaccctgtctcaaaaaaaaaaaaaaaaaaaaagtagaaacttctgccttgctttgagctgcccctttctggacgtttctcatcagtagagaatattcctgccaccctatcagacaaaactcccactggtttggagtctctccattctcaggaacacctcaggagtcagacagtgagcagcagggagcaattttttgacttgtaagccccttaccaagcctggttcatttgtttattaaaagcaggtgtgggtgaatttatgcaaatgagtatgcaaactagtggaacagcagaaggattgaatggatacaccaaaaataaccacaactgtttaagggaaaagggtccataataaatgtggggaacaaaaaacaaataaatgtgattttttttag

SEQ ID NO: 476 - DNA, 7038 bp, Mus musculus
atggatgaaccatctccgttggccaaaactctggagctaaaccagcactcccgattcataattgggtctgtgtctgaagacaactcagaagatgagatcagtaacctggtgaagctggacctagaagagaaggagggctccctgtcaccagcctccgtcagctcagatacactttctgatttggggatctctggcttacaggatggtttggcctttcacatgagatccagcatgtctggcttgcacctagtaaaacaaggtcgagacagaaagaaaatagactcacaacgagatttcactgtggcttctccagcagaatttgttactcgttttgggggaaataaagtaattgagaaggttcttatcgccaacaatggtattgcagcagtgaaatgcatgcgatctatccgtcggtggtcttatgaaatgtttcgaaatgaacgtgcaatccgatttgttgtcatggttacacctgaagaccttaaagccaatgcagaatacattaagatggcagaccactatgttccagtgcctggaggacccaacaacaacaattacgcaaatgtggagttgattcttgatattgctaaaaggatacctgtacaagcagtgtgggctggctggggtcatgcctctgagaacccgaaactcccagaactgctcttaaaaaatggcattgctttcatgggccctccaagccaggccatgtgggctttgggggataagattgcatcttctattgtggctcaaactgcaggtatcccaactcttccctggagtggcagtggtcttcgagtggattggcaagaaaatgatttttcgaaacgtatcttaaatgttccacaggatctgtatgagaaaggctatgtgaaggatgtggatgatggtctgaaggcagctgaggaagttggctatccagtgatgatcaaggcctcagagggaggaggagggaaagggatcagaaaagttaacaatgcagatgacttccctaacctcttcagacaggttcaagctgaagttcctggatcacctatatttgtaatgagactagcaaaacaatctcgacatctggaggtccagattctggcagatcagtatggcaatgctatttctttgtttggtcgtgactgctctgtgcagcgcaggcatcagaagatcattgaagaagctcctgctgcgattgctaccccagcagtatttgaacacatggaacagtgtgcagtgaaacttgccaaaatggttggttatgtgagtgctgggactgtggaatacttgtacagccaggatggaagcttctactttttggaactgaaccctcggctacaggttgaacatccttgtacagagatggtggctgatgtcaatcttcctgcagcacagctccagattgccatggggatccctctatttaggatcaaggatattcgtatgatgtatggggtatctccttggggagatgctcccattgattttgaaaattctgctcatgttccttgcccaaggggccacgtgattgctgctcggatcaccagtgaaaacccagatgaggggtttaagcccagctctggaacagttcaggaacttaattttcgtagcaataagaacgtttggggttatttcagtgttgctgctgctggaggacttcatgaatttgctgattctcagttcgggcactgcttttcctggggagaaaacagggaggaagcaatctcaaatatggtggtggcactgaaggagctgtctattcggggtgactttcgaactacagtggaatacctcatcaaactgctggagacagaaagctttcagcttaacagaatcgacactggctggctggacagactgatcgcagagaaagtgcaggcagggcgacctgacaccatgttgggagttgtgtgtggggctctccatgtagcagatgtgagcctgaggaacagcatctctaacttccttcactccttagagaggggtcaagtccttcctgctcacacacttctgaacacagtagatgttgaacttatctatgaaggaatcaaatatgtacttaaggtgacccggcagtctcccaactcctacgtagtgataatgaatggctcgtgtgtggaagtggatgtgcatcggctgagtgatggtggcctgctcttgtcttatgacggcagcagttacaccacatacatgaaggaagaggtggacagatatcgaatcacaattggcaataaaacctgtgtgtttgagaaggaaaatgacccatctgtaatgcgctcaccgtctgctgggaagttaatccagtatattgtggaagatggcggacatgtgtttgctggccagtgctatgctgagattgaggtaatgaagatggtgatgactttaacagctgtagaatctggctgcatccattatgtcaaacgacctggagcagcacttgaccctggctgtgtgatagccaaaatgcaactggacaaccccagtaaagttcaacaggctgagcttcacacgggcagtctaccacagatccagagcacagctctcagaggcgagaagctccatcgagttttccactatgtcctggataacctggtcaatgtgatgaatggatactgccttccagaccctttcttcagcagcagggtaaaagactgggtagaaagattgatgaagactctgagagacccctccttgcctctgctagagctgcaggatatcatgaccagtgtccctggccggatccccctcaatgtggagaagtctattaagaaggaaatggctcagtatgctagcaacatcacatcagtcctgtatcagtttcccagccagcagattgccaacatcctagatagtcatgcagccacactgaaccggaaatctgagcgggaagtcttcttcatgaacacccagagcattgtccagctggtgcagaggtaccgaagtggcatccgtggccacatgaaggctgtggtgatggatctgctgcggcagtacctgcgagtagagacacagtttcagaacggccactacgacaaatgtgtattcgcccttcgggaagagaacaaaagcgacatgaacaccgtactgaactacatcttctcccacgctcaggtcaccaaaaagaatctcctggtgacaatgcttattgatcagttatgtggccgggaccctacacttactgatgagctgctaaatatcctcacagagctaacccaactcagcaagaccaccaacgctaaagtggcgctgcgcgctcgtcaggttcttattgcttcccatttgccatcatatgagcttcgccataaccaagtagagtctatcttcctatcagccattgacatgtatggacaccagttttgcattgagaacctgcagaaactcatcctctcggaaacatctattttcgatgtcctcccaaactttttttaccacagcaaccaggtggtgaggatggcagctctggaggtgtatgttcgaagggcttacattgcctatgaactcaacagcgtacaacaccgccagcttaaggacaacacctgtgtggtggaatttcagttcatgctgcccacatcccatccaaacagagggaacatccccacgctaaacagaatgtcctttgcctccaacctcaaccactatggcatgactcatgtagctagtgtcagcgatgttctgttggacaacgccttcacgccaccttgtcagcggatgggcggaatggtctctttccggacctttgaagattttgtcaggatctttgatgaaataatgggctgcttctgtgactccccaccccaaagccccacattcccagagtctggtcatacttcgctctatgatgaagacaaggtccccagggatgaaccaatacatattctgaatgtggctatcaagactgatggcgatattgaggatgacaggcttgcagctatgttcagagagttcacccagcagaataaagctactttggttgagcatggcatccggcgacttacgttcctagttgcacaaaaggatttcagaaaacaagtcaactgtgaggtggatcagagatttcatagagaattccccaaatttttcacattccgagcaagggataagtttgaggaggaccgcatttatcgacacctggagcctgctctggctttccagttagagttgaaccggatgagaaattttgaccttactgccatcccatgtgctaatcacaagatgcacctgtaccttggggctgctaaggtggaagtaggcacagaagtgactgactacaggttctttgttcgtgcgatcatcaggcactctgatctggtcacaaaggaagcttctttcgaatatctacaaaatgaaggggaacgactgctcctggaagctatggatgaatcggaagttgcttttaataatacaaatgtccgcactgactgtaaccacatcttcctcaactttgtgcccacggtcatcatggacccatcaaagattgaagaatctgtgcggagcatggtaatgcgctatggaagtcggctatggaaattgcgggtcctccaggcagaactgaaaatcaacattcgcctgacaacaactggaaaagcaattcccatccgcctcttcctgacaaacgagtctggctactacttggacatcagcctgtataaggaagtgactgactccaggacagcacagatcatgtttcaggcatatggagacaagcagggaccactgcatggaatgttaattaatactccatatgtgaccaaagaccttcttcaatcaaagaggttccaggcacagtccttaggaacaacatatatatatgatatcccagagatgtttcggcagtcactcatcaaactctgggagtccatgtccacccaagcatttcttccttcgcctcctttgccttccgacatcctgacgtatactgagctggtgttggatgatcaaggccagttggtccatatgaacagacttccaggaggaaatgagattggcatggtagcctggaaaatgagccttaaaagccctgaatatccagatggccgagatatcattgtcatcggcaatgacattacatatcggatcggttcctttgggcctcaggaggatttgctgtttctcagagcttctgaacttgccagagcagaaggcatcccacgcatctacgtggcagcgaacagtggagctagaattggacttgcagaagaaatacgccatatgttccatgtggcctgggtagatcctgaagatccctacaagggatacaagtatttatatctgacaccccaggattataagagagtcagtgccctcaattctgtccactgtgaacatgtggaggatgaaggggaatccaggtacaagataacagatattatcgggaaagaagaaggacttggagcagagaaccttcggggttctggaatgattgctggggaatcctcattggcttacgatgaggtcatcaccatcagcctggttacatgccgggccattggtattggggcttaccttgtccggctgggacaaagaaccatccaggttgagaattctcacttaattctgacaggagcaggtgccctcaacaaagtccttggtcgggaagtatacacctccaacaaccagcttgggggcatccagattatgcacaacaatggggttacccactccactgtttgtgatgactttgagggagtcttcacagtcttacactggctgtcatacatgccgaagagcgtacacagttcagttcctctcctgaattccaaggatcctatagatagaatcatcgagtttgttcccacaaaggccccatatgatcctcggtggatgctagcaggccgtcctcacccaacccagaaaggccaatggttgagtgggttttttgactatggatctttctcagaaatcatgcagccctgggcacagaccgtggtagttggcagagccaggttagggggaatacccgtgggagtagttgctgtagaaacccgaacagtggaactcggtatcccagctgatcctgcgaacctggattctgaagccaagataatccagcaggccggccaggtttggttcccagactctgcatttaagacctatcaagctatcaaggactttaaccgtgaagggctacctctaatggtctttgccaactggagaggtttctctggtgggatgaaagatatgtatgaccaagtgctcaagtttggcgcttacattgtggatggcttgcgggagtgttcccagcctataatggtttacatcccgccccaggctgagcttcggggtggttcttgggttgtgatcgaccccaccatcaaccctcggcacatggagatgtacgctgaccgagaaagcaggggatctgttctggagccagaagggacagtagaaatcaaattccgtaaaaaggatctggtgaaaaccatgcgtcgggtagatccagtttacatccgcttggctgagcgattgggcaccccagagctaagccccactgagcggaaggagctggagagcaagttgaagaagcgggaggagttcctaattcccatttaccatcaggtagctgtgcagtttgctgacttgcacgacacaccaggccggatgcaggagaagggtgtcattaacgatatcttggattggaaaacatcccgcaccttcttctactggaggctgaggcgcctcctgctggaggacctggtcaagaagaaaatccacaatgccaaccctgagctgactgacggccagatccaggccatgttgagacgctggtctgtagaagttgaaggcgcagtgaaggcttacgtctgggacaataataaggacctggtggagtggctggagaagcaactgacagaggaagatggcgtccgctctgtgatagaggagaacatcaaatacatcagcagggactatgtcctgaagcagatccgcagcttggtccaggccaacccagaagtcgccatggactccatcgtccacatgacccagcacatctcacccacccagcgagcagaagttgtaaggatcctctccacaatggattccccttccacgtag

SEQ ID NO: 477 - DNA, 1450 bp, Mus musculus
  misc_feature (1045)..(1045): n is a, c, g, or t
gcggccgcccaggccacagccctgcttgggacacaaggatcgccaccagaccgctgcgcctaggacgcgtcgagagcctgtggccagcgcactcggaccgtggggcggagacccaggagaccggagcagagctgtgcagacagcatcaggattgctgaaagacaggtgtcagcatgactgaacgctttgactgccaccactgcaatgaatctctgtacggcaagaagtacattctaaaggaggagaacccacactgtgtggcctgctttgaggaactctatgccaatacctgtgaggagtgtggaacacccatcggctgcgactgcaaggacttgtcctacaaggatcggcactggcatgaaggctgcttccattgctcccggtgtggaagctcgctggtggacaagccctttgctgccaaggaggaacagctgctgtgcaccgactgctattccaatgaatactcgtccaagtgccaggaatgcaagaaaaccatcatgccaggtacccgcaagatggaatacaagggcagcagctggcacgagacctgcttcacctgtcagcgctgccagcagcccattggaaccaagagcttcatacctaaggagaatcagaacttctgcgtgccctgctatgagaagcagtatgccctgcagtgcgtgcagtgcaaaaagcctatcaccacaggaggtgttacttaccgggagcagccctggcacaaggaatgctttgtgtgcacagcctgcaagaagcagctatctgggcaacgcttcacagcacgggatgagtttccatactgcctgacctgcttctgtgacttgtacgctaagaaatgtgctgggtgcaccaaccccattagtggtctgggtggcacaaagtacatctctttcgaggaacgccaatggcacaacgactgctttaactgtaagaagtgctccctgtctctggtgggacgaggcttcctcacagagagagatgacatcctctgtcctgactgtggaaaggatatttgaaggcggcacagaagccacagcgcgtggcgagnagattcggatgttttctttcataaccaggcaatgctgtgttctgattcccaccagccaccacgaggcttcctcttgctgccctggcttcacatttgttgaaaccctttagttcttttcttctcagtggggacaagatccatccgtaagccccggatgggaagatggtttggaattttatagaaatgcaaggcagattaaatgaaaaagtcttgagtgtctttataatgcatccttccttcacatcctatttaattttttaagtgcaattaacatgtgttatgaacttgaatgtattttcacgggagagctgggatttgcagctttgtgacttcctttttatgtaaaacctagaggaagacttatgtgacttacaataaaattattcagaataaaacattttgtca

SEQ ID NO: 478 - DNA, 5358 bp, Mus musculus
cgggttcttccgggttggaggcacaacgccgcgggccaaccccgggtctgctagcgcggcgtggcgtttgctcgcagcccggggtcgccatctgtcccgcctgccggtccagtaatccaccttcaaggaattggggatccgaaacgttgggagcataaagcagcatggcgcacctactgaagacggtggtggctggctgttcatgtcctttccttagcaacttggggtcctctaaggttctacctgggaagagagactttgtacgaatgcttcgtactcaccaggcactgtggtgtaaatccccggtaaagccaggaattccatataagcagttgacagttggggtccccaaggagattttccaaaacgagaagcgagttgcattgtctcctgcgggggtccaggccctggtcaagcagggcttcaatgttgtcgtggaatcaggcgcaggcgaagcttccaagttcccagatgacctctacagagcagcaggggcccagatccaagggatgaaggaagttctggcttctgatctggtggtcaaagtgagggcccccatggtgaacccgacgttaggcgctcacgaagctgactttttaaagccatcaggaactctaattagcttcatctacccagcccaaaatccagacttgctcaataaactttctgaaagaaaaaccacagttctggcgatggaccaggttccaagagtgacaatagctcagggctatgatgctctcagttccatggccaacatctctggttataaggctgttgttttagcagcgaatcattttgggaggtttttcactgggcagatcacagctgctggaaaagttccccctgcgaagatcctgatagttggtggtggcgttgctgggctcgcttctgcgggggcagcaaagtcgatgggcgcagttgtccgaggatttgatacaagagctgccgctttggaacagttcaaatcccttggtgctgaacccttggaggttgacttgaaggaatctggtgagggccaaggaggatacgcgaaagagatgtccaaagagttcattgaagctgaaatgaagctctttgctcaacagtgcaaggaggtggacatccttatcagcacagctctgattccaggtaagaaagctcctgttttatttagtaaagaaatgatcgagtccatgaaggaagggtcagttgttgtggatttagctgctgaggctggaggaaactttgaaacgactaagccgggagaactttacgttcataagggaatcactcatattggctacacagaccttcccagcaggatggccacccaggcgagcactctctattccaacaacatcactaagctcctgaaggccatcagccctgacaaggacaattttcactttgaagtgaaggatgactttgactttggtacaatgagtcacgtcattcgagggaccgtggtgatgaaggatggcaaagtgattttcccagctcccacaccaaaaaatattcccgaagaagccccagtcaaaccgaagaccgtggctgagctggaagccgagaaagcaggcaccgtctccatgtacacaaagacactgacgacagcatctgtgtactcggcaggtctcactgggatgttaggtttgggcatcgtggcccccaatgtagccttttctcagatggtgaccacttttggcctagccggcattattggctaccacactgtttggggagtgacccctgctctccactcaccgctgatgtctgtgaccaatgccatctcaggtttgactgcagttggtgggctggcgttgatgggagggcatttttatccctccacaacttctcagagtcttgctgctcttgctacatttatatcatcagtcaacattgcaggtggttttctggtgactcagagaatgctggacatgttcaagcgacccacggaccctccagagtataattatctgtatctgctccctggtggcaccttcgtaggtggatatttagctgctctctacggtggctataacatcgaagaaatcatgtacctgggctcaggcttgtgctgtgttggggccctgggcggcctttccactcagggaacagctcgactcggcaatgccttgggcatgatcggggttgcaggaggcctggcagccacccttggaggcctgaagccggacccgcagctgttagctcagatgtctggagcaatggcaatgggtggcaccatcggcctgacgatcgcaaagcggatccagatttccgacttgcctcagctggtcgctgctttccacagtttggtggggctggcagcagttcttacctgcatggccgagtacatcgtagagtatccacattttgcaatggatgccacgtcaaatttcaccaagattgtggcttaccttggcacttacatcggcggagtcacctttagtgggtctcttgttgcctacggaaaattacagggtattttgaaatcagctcctctgctgctccctggaaggcacgcactcaatgcaggcctgctggctgctagcgtgggtgggataatcccatttatggctgaccctagctttaccaccggcatcacctgtctgggctctgtgtccgcactctctactctcatgggtgtgactttgacggctgctattggtggtgctgacatgcctgtcgtcatcaccgtgctaaacagctactcgggctgggctctgtgtgccgagggcttcctgctcaacaacaacctgctgaccatcgtgggcgcgctcatcggctcctctggtgcaatcctgtcgtacatcatgtgtgtggccatgaaccgctccctggctaatgtcattcttggaggctatggcacaacgtcaacagctggtggaaaacccatggaaatttctggcacacatacagaaatcaacctggacaacgcagttgagatgatccgggaagctaacagcattgttattactccagggtatgggctctgtgctgctaaagctcagtaccccattgccgatttggtgaagatgcttactgaacaaggcaaaaaagtcaggtttggaatccacccagttgcgggccgaatgcctggtcagcttaatgtgctcctggccgaggcgggagtgccctatgatattgtgttagaaatggatgagatcaacagtgattttccagacaccgacttggttcttgtcattggagcaaacgacactgtgaattcggcggctcaagaagaccccaattctataattgcaggcatgccggtccttgaggtctggaagtccaaacaggtcattgtcatgaagaggtcccttggcgttggctacgctgccgtggacaatccgatcttctacaaacctaacacagctatgcttctgggggacgccaagaagacatgtgacgctctgcaggccaaagttcgggaatcctatcagaagtgaagattgaagatccagccgatgccttcggttgcaggaacagagaaaggaggcgttcatagatgagcaaagctctcaagacccaaagaagcctcacaaaacaatggagattttcaagatcagcaccccatgcttctcaaaaagcattggaaattctcatcgcctacctatgtactgtcgccattgcccaaaaagcaagagtattttgtccacagtgaaaaagcagcctcactttagatgcaaccccactggattcttaaaattccctttcagtagctagaaatcagttcagaagttgaatgttcgagatttcaggatatgggttggtctgaaaaatattacacaatatgatcattgtagacacctgcatttagtgcctttttttcttttttcttttcaccagatgtgactaatttgaaacctttatcaactcctgacctgttctcttgcatcttagccatactctggattgatcatgccaaatctgcagcaggttatcagccttcactatagactctagattccaaagatctattttctcacttctattttaatatgtaaaaggtctagatagtttaagtaataacttaaacataataagttgtatttttgaaagtcccattgccaattggtctctttaactgcaatcaactaagtgctcttgaatggactgtattaagtgcgcttgaatggaatgcaaccatctgagtaataaatgagtttataaaagtgatgtagcttcgtctctgatgacaaagagctaacattaaatggttccactcattaacactggaggaagacctactactttgtaataggtagagttaatctctcttcattgtttagaagatggaattacttttcaaagccactgtaatttgtgaggtcgtatataatttgatgacactgaaacataataacagtatttttagccatatcttcaatgaacagtgaaaaaaggaacatctttcatagaagtttagattttctttgtgactttaccttttacatcaaaagctctttagtagagatgaatgtggctcattattaggattctgtctctctgtgcactcggtttggtaccaagtctcccaaagtagttattaacccatacaaggcttggggcttaattggtcgagtgcttgccttatgtgaggtcctgagtccaatccccactactgaaaagcaaacaagcagcaaagctgttgacgcacacaaagctgtccctaaatctgaagactatcagtgaaaactttgctcatctttatcaagtttctaacgcacaatatctgttaggtttatgagcaagttctgtttcactgtgtctgagataaaggataggggagggaggaaggggaaggagggacagagaagagggaggagaggagggagaagcaagagggagatgttagagcagcaaagatttcttttaaatatctaagaaataaatgcaatttactaatggatctgaggttactagtagcttcaagtttattataaaagttctgttagacaaaattaaataatatctttattcatattcctttcttccttttaaagccgctgtaggtgtttctagaaagtagcaagttaaattttgaaagtagttccaaaattcaatttaaatcttaataattggaggggattttacttctttccccagatgccttttggtggtatctagagacatttttgggtttcagaactggcagatcctactagcatccaatgataaaagccaaggaatgctactaaatgatcattctaaatgcacaggaccagtctccagcaccatgcagtacagggtataatctactccccaagtatcaatctgatgtctttcttggtgtcttaaatactaattacaatatctaaagcatggcagttttagtttatggcactatttatatgaaaaaaaaaagcatttgtcaaaatg

SEQ ID NO: 479 - DNA, 2862 bp, Mus musculus
ctttattgcttgaagtcatgggtcagctgttctcttcacctaagagtgatgagaataatgatttgccctccagctttactggttattttaagaaatttaatacgggaagaaaaatcatttctcaagagatcctcaatttgattgaattaaggatgagaaaagggaatattcagttgacaaactctgcaatcagtgatgcattaaaagaaatcgatagtagtgtgctcaatgttgctgtcaccggggagacgggatcagggaagtccagcttcatcaataccctgagaggcattgggaatgaagaagaaggtgcagctaaaactggggtggtggaggtaaccatggaaagacatccatacaaacaccccaatatacccaatgtggttttttgggacctgcctgggattggaagcacaaatttcccaccagacacttacctggagaaaatgaagttctatgagtacgatttcttcattattatttcggccacacgcttcaagaaaaatgatatagacattgccaaagcaatcagcatgatgaagaaggaattctacttcgtgagaaccaaggtggactctgacataacaaatgaagcagatggcaaacctcaaacctttgacaaagaaaaggtcctgcaggacatccgccttaactgtgtgaacacctttagggagaatggcattgctgagccaccaatcttcctgctctctaacaaaaatgtttgtcactatgacttccccgtcctgatggacaagctgataagtgacctccctatctacaagagacacaattttatggtctccttacccaatatcacagattcagtcattgaaaagaagcggcaatttctgaagcagaggatttggctggaaggatttgctgctgacctagtgaatatcatcccttctctgacctttctcttggacagtgatttggagactctgaagaaaagcatgaaattctaccgcactgtgtttggagtggatgaaacatctttgcagagattagctagggactgggaaatagaggtggatcaggtggaggccatgataaaatctcctgctgtgttcaaacctacagatgaagaaacaatacaagaaaggctttcaagatatattcaggagttctgtttggctaatgggtacttacttcctaaaaatagttttcttaaagaaatattttacctgaaatattatttccttgacatggtgactgaggatgctaaaactcttcttaaagagatatgtttaagaaactagttgccttctaattaagctgaagtcctgtgactgtcaagaaaatagaatcaattaaagaaaaacaggacactgatactgtaaaacaatatactgggtttatccaggttattcgggctttatccacctttactgattatgtatccacattaggtagagcaaggggatcagatatgtataaataaactgatagctaaaaactatcccctcactttgagtaaactcttagatcaagtaattttacttatatttacatttgttcaatataaatcaacatccgtgttcagggttagcattgaggtgtttagttttgtcaacccaacagactctagagactcatgaaagatgagtctgggggattgcatttgggaaattattttgcttatgttaattgaggtaggaaaccctttcctctgtgggtggcaccattccctagctggcaatcgtcaactgtgtatttggagagaggtgctaagtagcagcatatttacattatttcataactctccactggtttttattgtagttgtttttaaactgtagatggaatgaaactagctgcctcaagattcttgataatgacctatataaccttaaacttgatactgtagtctttcttgaaagagatattaaagagaaaccataactgggctagagagatggctcagtagataaagtagaacttgtaagtttgaagacttaagttcagatacccagaacccacataaagccagctaatcatctgtaatccatgcacttctatggtgagatgggaggtagaatgagaaaaattttggaagattgtggggccagctatcctgccacatgcagtagtaaataagaggccctgactcaagcaagtggaaggtaaaagataacaagcaagctcatcctttgatctctgcatacatgcatcgtcatgttcatgcctgatatcacatatggaaatatacacacaaaaaaagttttttcattaaaaaaaaaaaagaagaagggaggtttggggcaatagctcattggtataatacctgcctcacgctcatgaggcctcaagttcatcccctagaactccagaaaaaggcaaaaaggggatgtcttcgaggttaaaagagttggcccagtggttaagaatactggctactcttgcaaaggaccaggatttaactgccagaacccacagagtagctcacagttacctgcaaattctgtctcaggggatctgatctcatcctctcacctccacagggaccaggaacatgtttatatggtacatggacatacatgtaaggcaaacattcatacaataaaaataaattaagaaacattttaaatatgtaattaaattaaaaagggaaagataaatcacagtagcctcaataaggactaagaattttacaaaaatcctatttagtcagaatccttgagaaaatactaaagaaggtttctaattctatgccagaactaggggacatgatgaaatttctctgctttataatgattagtgttttgaatgctatgacaataaagggctgctctattccatatgaataataaaagtcatttaataaattctttctgaaaaaaaaaaaaaaaaaaaaaaaaaaaa

SEQ ID NO: 480 - DNA, 1098 bp, Mus musculus
ggtggagcagccgctgcgtctcaggtctcttttcccgagccaggatcttgtgctgaaagccatttccaaagtgccttgggacagcctacccctctgacctacacagcctggaaaagagccactgttagcctgtagaggggtggcctgaaccagctcagtagctcctttgattctgggatctgcactgaacttgatctccatggcacaccggctgcagatgcgtctgctgacgtgggatgtaaaggatactctgatcaagctccgccgacccgtcggggaggaatatgccagcaaggcccgggcccatggagtggtggtggaagacataaccgtggaacaagccttcaggcaggcataccgggctcagagccacaacttccccaactatggcctgagccgtggccttacttcccgtcaatggtggaaggacgtggtcctacacaccttccgcctagcaggggtcccagatgcccaggccatgactccagttgctgaccagctatacgaagacttcagcagccctttcacctggcaggtgttggagggggctgagatgaccctgaaggggtgccgtaagcggggtctgaagctggcagtggtctccaactttgaccgacgactagaggatatcctaacaggccttggcctgcgagaacattttgattttgttttgacttctgaggctgtgggctgtcctaaacccgacccacggattttccgtgaggctctgcagcgcgcttgtgtagaacctgcagtggcggcccacgtgggggatagttacctctgtgattaccaggggtctcaggctgtgggcatgcacagcttcctggtagcgggctcagagcctctggactctgcagtcagagattctgtacctaaggaacatattctaccctccctctcccatctcctgcctgcccttgaccttctggaggcctcaagccctatgtcatgagtctggtgagggaagtagctgggaccaaataaacactggaggcagggagtcccttctctctcacctctcctgcagagggaggtgtctcggctctcctgctgcagcctccataatttaatctgagcataaaaaaaaaaaaaaaa

SEQ ID NO: 481 - DNA, 2161 bp, Mus musculus
ggtgtttcctttctcggtccaaagcactagacgcctgcacccccgttcccctccgggccgccgcaaagcccgcggttctaggaagatgaggcttccgggaagggctgggacgcagcggacaaaagattaggaggcgcctggccccgccccaccggcccagcccgtcccccctcgtccttccaagctgttcgcaccacagcctttcagtccctgctcgccgcccgtgtgccccgggaccctgaccttcgcacccctggcacccattggctcctttctccttccatcccgccgaactccgactctcgagccgccgttgtctctgggacatggtcctttgcgtacagggatcttgtcctttgctggctgtggagcaaattgggcggcggcctctgtgggcccagtccctggagctgcccgggccagccatgcagcccttacccactggggcattcccagaggaagtgacagaggagacccctgtccaggcagagaatgaaccgaaggtgctagaccctgagggggatctgctgtgcatagccaagacgttctcctaccttcgggaatctgggtggtactggggttctattacagccagcgaggcccggcagcacctacagaagatgccggagggtacattcctagttcgagacagcacccaccccagctacctgttcacactgtcagtcaaaaccacccgtggccccaccaacgtgcggatcgagtacgccgattctagcttccggctggactctaactgcttgtcaagacctcgaatcctggccttcccagatgtggtcagccttgtgcagcactatgtggcctcctgtgcagctgacacccggagcgacagcccggatcctgctcccaccccagccctgcctatgtctaagcaagatgcacctagtgactcggtgctgcctatccccgtggctactgcagtgcacctgaaactggtgcagccctttgtgcgcaggagcagcgcccgcagcttacaacatctgtgtcggctagtcatcaaccgtctggtggccgacgtggactgcctacccctgccccggcgtatggccgactacctccgacagtaccccttccaactctgactgagccaggcaccctgctctgcctcacacagtcacatcctggagggaacacagtccccagctggacttggggttctgctgtcctttcttcagtcatcctggtgcctgcatgcatgtgacagctggaccagagaatgccagcaagaacaaggcaggtggaggagggattgtcacacaactctgaggtcaacgcctctaggtacaatatggctctttgtggtgagccatgtatcagagcgagacaggcaggacctcgtctctccacagaggctggacctaggtctccactcacttgcctgcccttgccacctgaactgtgtctattctcccagccctggtttctcagtctgctgagtagggcaggccccctacccatgtatagaatagcgagcctgtttctgggagaatatcagccagaggttgatcatgccaaggccccttacggggacgcagactgggctaggggactacacagttatacagtatttatttatttattctccttgcaggggttgggggtggaatgatggcgtgagccatcccacttctctgccctgtgctctgggtggtccagagacccccaggtctggttcttccctgtggagacccccatcccaaaacattgttgggcccaaagtagtcctgaatgtcctgggcccatccacctgtgtatggatgtgcccacttttttctcccaagcctcttttgggaggctgggtggccagacagacaggagccagaaacacaagggctcccactcttctcctcacagggcagcaccatggcttcatagagctggcttctctatgttgtgccccacctcacccccctgccgaggggcgtgtgctgggtcgggaagtggatgcttatccaagggccgcagatgtagctcccttgtgtccgtttcctgcctaggaagttgcctgcacgtgagagagggagaaatacatacacacctaacaagactttagaaagcaagtgttagaacacaagaaccagtttgggagtttttcttccactgatttttttctgtaatgataataaaagtatgccttccactt

SEQ ID NO: 482 - DNA, 540 bp, Mus musculus
ctctttcctctggccacagaagacaaagggagtgaggtggtcactgcaagatgagcttcaagtgccagtccctcatctcaacccagaccctggtaggagcatccagcaccattcagttcttcttctctgaggcactcatgggtcagaacttccaggaggtggagttagaaaactacgagcctcagcctggagacctgttcctgttcaagttgcagacccctaaggcacagtggtgcggggcccacgtgggtgtttactgcggccaaggagagatcatacactttgagggcgcggtggcgttgaccctagggtgctggagagccgcgtgcgagaagctatggacaacgatcctcctccctaccatcccactagcagcaactgtgtgcactttgcactgaacctgttgggcatggactcaatgtcaatggacaggaacctaaccagtgattaatgtgaccttgggtcctcctgaatgggccaaaagaggtttcagaagggatcattaaagtattttcccaaacgcaaaaaaaaaaaaaaaaa

SEQ ID NO: 483 - DNA, 2348 bp, Mus musculus
ggcagcagttctcaatagtgttatatatagaaatcagatcggtcattgtttcccagcctgctaaataaaactagaccgctggaatggcatgccacttgacctccagggcgtccacagcagcgtttaacaggcacaaagggagtactcttgcaagtatctcctgtttacatgccagattcccctgctagttcacacaatgttcaaaaggcacaagtccctggaacgcaagagggaattgttattccagggactgccacagtccacaatgaagaataatgcgagaaatttccactctttgtcacaacttgtactctcagcaggcccgctcaaaactactacagcagtcaaacattcaaaaacgactcactttgagatcgaaatactggatgctcatacaagaaaacaaatatgtattgtggataaggtcacacaaacatcaactattcatgatgtcaaacagaagtttcacaaagcatgtccaaagtggtacccttctcgaattggcctacaactagaatatggtggcccatatttgagggactacatcacagttcaaagtgttgcagcttcttcaattatcacactctattttacagacttgggtcagcaagtcgggtggactacagtctttttggctgaatactcaggacctctgttaatataccttcttttttacttgaggagctcatacatatatgatgtcaaggagagcactagatggccccggcaccctgtggtacacttggctttcttctgccattgtatccactacatccgactcctcctggagactttatttgttcacaaagtttctacaggacacagtcctatgaaaaacttgataaagggttgtgcattttattggggattcacttcttggatggcttatcatattaatcacccaagatatacaccaccatcatttggaaacaggcaagtaatagtgtctgctatcaactttctgttttgtgaagctggaaatcatttcatcaatacagttttggctcatccaaatcacacaggtagcaatgcctgtttcccaagtccaaattacaacccctttacatggttgtttttcctggtttcctgtcctaactatacctatgagatcggatcttggattagtttcacagttatgacccagacacttccagttggtattttcacaatcttaatgaccatccagatgtctctgtgggcacgaaagaagcataaaatatatcggaagaagttcaactcatatgttcataggaaatcagccataattccactcatattataagtaaatatagctattctaatctgagcaagaagtgcagaatataaattcactcaaaaaggcttaggaagtgattacctattataatgcaacaattttattctaaatattcctctccaaactctcctgtctatacccacaactctttgcctattctttccctcacccttctctcagcattgggatctgctgacttgtgggttttgcctcatctctgtgagctcacattatcagcccgatgagtttgaagacaccgtttccttggagttctctatcatttctgggctcttacaatctttccatctcctcattagcatagatgtctaagtcttaaggaagggggtttatttaagttacagcttatatctatattaaaatgctgtctctaaaatgtaagccaagttacaaaattcctgattttgtttgtgtgttgacatttgccaggaatggatcaaaaatttaagatgtttcagcccaaattataattattggtctcagttcaggtcaaaattcagctattggtgtatttcaattataccaagtttgctcctgaaataaaaattttccttgaattaataataatgattcttctatttatattgtttacaacataaaagtataaaataatcctctggttttctcaatatattcaaagagaatatagcttaatgttgctgtataggttcaattaaagttactcttgtaccttagatgacttgtaccatctgtgtataacaataataattaaaaattcagtttctaaaggctgtttaaaagttaatttatgccctgattcatatagaactttataattactgttggtttcaaggagcctcagtatagaaagtcccaaagacagtatttcttgctaacaggcccactttatttttgaaatacttttcagtgatgatgcatgaaaactgcaaaatgatacttggaattatttacaaaatcaatgtacaagtaacttagaatgacttttgccagaaaaaaaaaagaatttctattcttgaatttaacaagaaacaaagacctgtaatatggtgccaaaataaagtaaaatttgtat

SEQ ID NO: 484 - DNA, 4665 bp, Mus musculus
aaaacgtcctcacccgaggggacctcgcctccatccgctgggtctcctcccccctgaagcacacgcagccctcgagctcaggagcacagctctgcactgtctactacgcctcactgaacttccgagacatcatgctggccacgggcaagctgtcccctgatgccattccaggtaaatgggccagccgagactgcatgctcggcatggagttctcaggccgggataggtgtggccggcgtgtgatggggctggttcctgcagaaggcctggccacctcagtcctgctatcatctgacttcctctgggatgtaccctccagctggaccctggaggaggcggcctctgtgcccgtcgtctataccactgcttactactcgttagtggttcgcgggcgcatccagcgtggggagaccgtgctcatccactcaggttcaggtggtgtgggccaagcggccatttccattgccctcagtctgggctgccgcgtcttcaccactgtgggctctgcagagaagcgagcatacctccaggccaggttccctcagcttgatgacaccagctttgccaactcgagggacacatcatttgagcagcacgtgttactgcacacaggtggcaaaggggtcgacctggtcctcaactcactggcagaagagaagctgcaggccagtgtgcggtgcttggctcagcatggtcgcttcttagagattggcaaatttgatctttctaacaaccaccctctgggcatggctatcttcttgaagaacgtcactttccatgggatcctgctggacgccctttttgaggaggccaatgacagctggcgggaggtggcggcactcctgaaggctggcattcgtgatggagtcgtgaagcccctcaagtgcacagtgtttcccaaggcccaggtggaagatgccttccgctacatggctcaggggaaacacattggcaaagtccttgtccaggtacgggaggaggagcctgaggctgtgctgccaggggctcagcccaccctgatttctgccatctccaagaccttctgcccagcccataagagttacatcatcactggtggcctaggtggctttggcctggagctggcccggtggctcgtgcttcgcggagcccagaggcttgtgctgacttcccgatctggaatccgcaccggctaccaagccaagcacattcgggagtggagacgccagggcatccaagtgctcgtgtcaacaagcaacgtgagctcactggagggggcccgtgctctcatcgccgaagccacaaagctggggcccgttgggggtgtcttcaacctggccatggttttgagggatgccatgctggagaaccagaccccagagctcttccaggatgtcaacaagcccaaatacaatggcaccctgaaccttgacagggcaacccgggaagcctgccctgagctggactactttgtggccttctcctctgtaagctgcgggcgtggtaatgctggccaaactaactacggcttcgccaactctaccatggagcgtatatgtgaacagcgcaggcacgatggcctcccaggccttgccgtgcagtggggtgccattggtgacgtgggcattgtcctggaagcgatgggcaccaatgacacagtcatcggaggtacgctgcctcagcgcatctcctcctgcatggaggtactggacctcttcctgaatcagccccacgcagtcctgagcagctttgtgctggcagagaagaaagctgtggcccatggggacggggacacccagagggatctggtgaaagctgtagcacacatcctaggcatccgagacctcgcaggtattaacctggacagcacgctggcagacctcggcctggactcgctcatgggtgtggaagttcgtcagatcctggaacgagaacacgatctggtgctgcccatgcgtgaggtgcggcagctcacgctgcggaaacttcaggaaatgtcctccaagactgactcggctactgacacgacagcccccaagtccaggagtgacacgtctctgaagcagaaccaactgaacctgagcacactgctggtgaaccctgagggtcctaccctaacccagctcaactcggtgcagagctctgagcggcctctgttccttgtgcaccccattgagggttccaccaccgtgttccacagtctggctgccaagctcagtgtgcccacctacggcctgcagtgcacccaagctgcccccctggatagcattccgaacctggctgcctactacatagattgcatcaagcaagtgcagcctgagggaccctaccgcatagctgggtactcatttggagcctgtgtagccttcgagatgtgctcccagctgcaggcccagcagggcccagccccgacccacaacaacctcttcctgtttgacggctcacacacctacgtgttggcctacacccagagctaccgggcaaagatgaccccaggctgtgaagccgaggccgaggctgaggccttatgcttcttcataaagcagtttcttgatgtggaacacagcaaggtgctggaggccctgctgccactgaagagcctggaagatcgggtggctgcctccgtggaccttatcactaagagtcaccacagcctggaccgccgagagctgagctttgctgccgtgtccttctaccacaagctccgggcagctgatcagtataagcccaaggccaagtaccatggcaacgtgacactgctgcgtgccaagacaggcggcacctatggcgaggacttgggtgctgactacaacctctcccaggtgtgtgacgggaaggtgtctgtgcacatcattgagggtgaccaccgcacactgctggagggcagtggcctggaatccatcatcaacatcatccatagctccctggctgagccacgagtgagtgtacgggagggctagacctgccgaccaccatgaagccacgctccacacctgccaccagagatgctccgatccccaccacaccctgagtgcaggaactggggagggtcctgctggtgggacccctccccccagtggcccagcaccacccgctcccctggtggctgctacaaacagaccatcacgcgtgtgtttcccagccgcgtagtggggttcccagagccactgacttggagacaccctggtctgtgaagagtcagtggaggcaggagccaaactgagccttttctaccgtgtggcatttgccacgctggtcgtttctccattaaattctcatatttattgcattgctgggaaagacccccaggggtgactcattccagaaccccctaaaatgggagaagccatgtggggaagatttctgggaaagtttctagactcaatacacaggctgctggctggagcccctttttgtcttgtcctgtccctgctcactgcagggcaggatatggagagggctggttcccagggaacaaggaccccagcagacactgtagcccgtggcccttggtccccagcatccccggctgccccatgatgcagggccatcctgactctgcggaccgcaccgggcactgactgtctgttttccaagacgaaaatgatgcttgggttttgacttttctgcagctgtcagtgtgaagaagtgtctggactgtgtcatttttacaccaacctggtaaaaatgctgctcttgatgctctcctgatcccacaattaaactgcacgtgagcgagcactgccttcggttcagtctctttccagtccaggcccggcttcaggctctgatacttatgggtattccccacaagtggcctccacagctcttccagtgagactccttggagggtgtgccattctgtcagtataaggggagtatgctaaaatgtgtttcagcatggagggctggctggaggccttgccactgtagtacaagcagaatttgtccacctttaagttgccctgagggcatcagcttagtcacagccccgccccagcggtagagaatagcatcatcctctacttgtagtcaactgagtgttggtgcaagccctctagagaaaaacgtaagcagtatgtgaccactgtgagaagcatgtccctggaaacaggtgacatgacgagagcagagggcctgagtcacacagaactgaccatgtgtgtaagcagaggagtggaggttgcttggaagaggaggatcaagagaaaagtaggctcagtttagtggacccacagtagcagccaatgtaattacattggcttggagctaaggcatggtgggtcctgcagggtggcttgttggactaggcaaagtcccctggcttgagggtccaggagagactgtcacaaggccgcagcattcgatcacatccagagaggagcatccagaggacaactgcattggtagggtacaaaggtgttcagaggatcccagtctgagtgattagcctaagactgaagcatctggttggctctagtcacacttagaaaaattcttacagcactcgtcatgagttgtccattcctggaaaggacctgcccaatctctatagtgtctctacctagttagagtttactgactcaagggagcagatttataaacttgcagaaaggcccgactcccttacgaggctgtgtggtccttagaattcatggatgagaggcaataaaaccttgaggtttc

SEQ ID NO: 485 - DNA, 2164 bp, Mus musculus
ggtcaagagtcgtcctgagctgaccgcagctgccttcagcagcatttgcaaccctgtaggtgaagcctcaggatcagctgcctccaggaaccatgccgaccgtggatgatattctagaacatataggggaattccaccttttccagaaacaaacatttttcctcttagctctgctctccggtgccttcacccccatctatgtgggcatcgttttcctgggcttcacccccaaccaccactgccggagtcctggagtggccgagctgagccagcgatgtggctggagcccagcagaggagctgaactacaccgtgccgggcctggggtctgcgggtgaggtctccttcctcagccagtgcatgaggtatgaggtggactggaaccagagcacccttgactgtgtggacccactgtccagcctggctgccaacaggagccacttgccactgagcccctgcgagcatggctgggtgtacgacactcccggctcctccatcgtcactgagtttaacctagtgtgtgctcactcctggatgctggacctgtttcagtcattagtgaacgtggggtttttcatcggtgctgtgggcattggttacctagcagacaggtttgggcggaagttctgcctcttggtcaccatcctcatcaatgctatctctggggttctcatggcgatttcacccaactatgcctggatgttggtgtttcgatttctacagggactggtcagcaaagcgggctggttaattggctatatcctgattacagaatttgttgggctgggctatcgcagaacagtagggatttgttaccaaatcgcctttactgttgggctcctgatcctggctggagtggcctatgcccttcccaactggaggtggctgcaatttgccgtgactctgcccaacttctgcttcctgctctatttctggtgcataccggagtctccaagatggttgatctcccagaacaaaaatgcaaaagccatgaaaatcattaagcatattgctaagaaaaatggaaaatcggtgccagtctctcttcagagcctgacggcagatgaggatactggcatgaaattgaacccttcgttcctggacttggtcagaacccctcagataaggaaacatacgttgatcttgatgtacaattggttcacgagctctgttctctaccagggcctcatcatgcacatgggcctcgcaggggacaacatctacttggatttcttctactctgccctggtggaattcccagctgccttcatcatcattctcaccatagaccggattggtcgccgctatccctgggctgtgtcaaatatggtggcaggagcagcctgcctagcttcggtttttatccctgatgatctacagtggctgaaaattaccgtggcgtgcttgggtagaatgggcatcaccatagcctacgaaatggtctgcctggtcaacgctgagctgtaccccacatacatcaggaatcttgctgtccttgtctgctcctctatgtgtgacattggtggcatcgtcacacctttcctggtctaccgtctcactgacatctggctggagttcccgctggtcgtatttgctgtggttggccttgttgctgggggacttgtgctattgctacctgagaccaaagggaaggctctgcctgagaccatcgaggatgctgagaagatgcagaggccaagaaaaaagaaagaaaagagaatttacctccaagttaagaaagcagaactaagctaaagagaaagagcatcattgctgctggagatgactttgctctctctgagaccagaggcagagcttctcttcccctcccgcgaaagccacacaacccaacctcacttacccctgaattcctgaactccatcagcagtgagctgtcgcccgcccagtttgttgcactgatgtgtccagctcttcctctcaaccaggacctcactccacctcactccactctcaacagtcctggggaatgcccattgctttgctggatttgttggggtttttttcatctgtacatttctttacttggtttctttctccaagcatgacatcaaaccaaaatatacaagggagctgtgggtcaggacaactaactattaaaaaaaattctgaaaaattataaaaaaaaaaaaaaaaaaaaaaaaaaa

SEQ ID NO: 486 - DNA, 1871 bp, Mus musculus
gcgaggagggggaggataaagggggagcgggagatcgagaaccctgcccagtcaccggagccagccctgcttgcagtttcctgaactaagtgcttctgcccacccacagcaactgattctaaggcctgactctagcaatggccttcgcaaatctgcgcaaagtactcatcagtgacagcctggacccctgctgccggaagatcctgcaagatggagggctgcaggtggtggagaagcagaacttgagcaaggaggagctgatagctgaactccaggactgtgaaggcctcattgtccggtctgctactaaggtcactgctgatgtcatcaatgcagcagagaagctccaggtggtgggcagggctggcacaggtgtggacaatgtggatctggaggctgccacgaggaagggcatcctagtcatgaacacccccaacgggaacagcctcagtgctgcggagctcacctgtgggatgatcatgtgcctggccaggcagattccccaggcaacagcttcgatgaaagatggcaaatgggaccggaagaagttcatggggacagaactgaacgggaagacactgggaattcttggcctcggcagaattggaagagaggtggccacccgaatgcaatcctttggaatgaagactgtaggctatgaccccatcatctctcctgaagtcgccgcctcctttggtgttcagcagctgccgctggaggagatctggcctctctgtgactttataactgtccataccccactcctgccctctaccacaggcttgctgaatgacagcacctttgctcagtgcaagaaaggtgtgcgagtagtgaactgtgctcgaggaggcattgtggatgaaggtgccctgctgcgtgccctgcagtctggtcagtgtgctggggctgcactggatgtgtttacagaagagccaccacgggaccgggccttagtggaccacgagaatgtcatcagctgtccccacctgggtgccagcaccaaggaagcccagagccgctgtggggaggaaatcgcagtccagtttgtggacatggtgaaggggaaatctctaacaggcgttgtgaacgcccaggccctcaccagtgccttctctccacacaccaagccttggattggtctggcagaagcaatgggcacgctgatgcacgcctgggctggctcccctaaagggaccatccaggtggttacacaaggaacatctctgaagaatgctgggacctgcctgagccctgcagtcattgtcggccttctgagagaagcatctaagcaggcagacgtgaacttggtgaacgctaagctactggtgaaagaggctggcctcaatgtcaccacctcccacaaccctggggttccaggggagcagggtagcggggaatgcctcctgactgtggccctggcaggtgctccctaccaagccgtgggcttggtccagggcaccacaccaatgctgcagatgctcaacggagctgtcttcagaccagaggtgccactacgcaggggccaacccctgctcgtattccgggctcagccctccgaccctgggatgctgcccactatgattggcctcctggcagaggcgggtgtacagctgctgtcctaccaaacctccatggtgtctgacggagagccctggcacgtcatgggcctgtcctccctgctgcccagcctggaaacatggaagcagcatgtattggaggctttccagttctgcttctgaccctggggttcagcactctcagccccacaggctcttctgaagaaacccgctcaactgtgacctatagggagaggggatcgcagaaccagggcatctgcctgaactaatacctagtaaagaattcttaactcc

SEQ ID NO: 487 - DNA, 3888 bp, Mus musculus
gactcgagacccagccgagcggggagacgagctgcagccttcatggactgtgagcggggtacagggtaggtagtacgccagggtccgaggccacgcgctctccaaaagacctccaaggttgagcgcgggctcagaatgtggccggaagaagagtcgcggcgtccctggtgaaggtcccgggttgcaaggtagggagtaggcagatggccaggcaaagttgatcagagaggaggtggttggcctgcgccttcgggccgctgggaacagccgaactacttggacttgacccgccgcgccccaggcgctctgagcagcgcctatcagtcgccctgcgcgggagcgcacttgcaaacttggtggaggtgccctgcgcgtcctgttgtgtaacctccgcgccgccagctggaccgggaagttgcccgcaggtccttcagcttagatcggtcgcagctccgggcgaatttcatggcccgcgacaaaagcgcggccagagccggcgtgggcgagcccctgcgcgctccgacccgtggggaactcccgcgcgcggtccctggcctgcgcctccgatgcgcgctgagtctctcgccgctgctgcccgctcgccgcggtctgccctttctagtagctgcctgagttggaaagaagaggatgaccgaggtgccttggtcggttgtccccaacgggacggatgctgcctttctggcgggcctgggctcgctttggggaaacagtactgtcgcctcaactgcagcagtttcctcttcattccaatgtgccctgaccaagaccggtttccagttctactacctgccggctgtctacattttagtgttcatcataggcttcctaggcaacagcgtggctatctggatgttcgttttccacatgaagccttggagcggcatctccgtgtacatgttcaatttggctctggctgactttttatacgtgctcaccctaccagccctcatcttctactacttcaacaagactgactggatcttcggggatgctatgtgcaagctgcagagattcatcttccacgtaaatctctacggtagcatcttgttcctcacctgcatcagcgcacacaggtacagtggcgtggtgtaccctctcaagtctctgggcaggctcaagaagaagaatgccatttatgtcagcgtgctggtgtggctcattgtggtggtggccatctcccctattctcttctactctggcactgggactcggaaaaacaaaactgtcacctgctatgacaccacgtccaatgattacctgcgaagttatttcatctacagtatgtgcacgactgtggccatgttctgcatccctttggtgctgatcttgggctgttatggattaattgttaaagctttgatttacaatgacctggacaactctccgctccggaggaaatccatttacctggtgataattgtcctgacggtgtttgctgtgtcttatatccctttccatgtgatgaaaacgatgaatttgcgagcacggttggatttccagaccccagaaatgtgtgatttcaacgacagggtttatgccacttatcaggtaacaagaggtctagcaagtctcaacagctgtgtggaccccattctttatttcttggctggagatacattcagaaggagactgtcccgagccaccaggaaagcttccaggaggagtgaggccaatttacaatccaagagtgaagaaatgactctcaatattttatctgagttcaagcagaatggagacacgagtttgtgaaggcacgagatcctagctcctgagttttgtaacatggtcacaagacatccctgagatgatctatgcatacacaggtcaagaagaagcaacactctattgaccaaaagaccagtgtgtgccacctgagtgagggttttcctataaagacagttatgttgacgttttgttgaaagacacctaaaactgtaagatttagcgagtcattaaacatcacactgcaaagatgtcttcattccattccaagctcaagggtttttcttgttgctctctgttgttattccttacgaagtgctgtctctgactctttgaaggttgctttgaacctgcattgaactaaaatgataaattaagaagaaacttcgcacaggagacagaattcaaaactaaaaccgtgacgtggccactgagaagaaacttggaaacccattcttcgtgaagaggaaaagtgacaggacaccatttgttgatgccgtaggtgctgtggtaaaccttggaaagcagtgagaactgtttggaatctgctcctctgcttcctaggactctgcagtccagtctttggctagagttctcattttccaccaactgtggtatggaaaggttgaaacttgtaaatctctgctcacttagccaggacactaacccatcgtgatataacacatatcagtacttagtagcggctagaattcaactatggacaggacgtagaagatgtgttactcgtaaatatacattgaagcttttcttctattggttgaatgtaatcattgtaatagtatttattgaagaggtttgtgggccttcagttgtacagattgaagatacagtgtgctagtgtaaattctatttattgcagtgtataatgttcaaatgtcacacgtatattttacagtaatatataatgctagataaaatgagaattttatttaggaggttttttctcagatattagtaactttggacttctaagaccagtttgtatttgtatctaaaatgatgaaaatgtggtttataacaagtgtttaattttctctagatttgaatttgcatgctttccttttgtgtggggctcttgctatacagacatgatttggtgttagattattgtaagatttataacaagtataggatattttagacaggttatatattacatacattatatgtgtatatttatattatagaaagtttgtgtgctattttcagaaagtttagaatattgctctaactatggttgcagcacccactgccaaaggctaaaggcttgtctcctttcaaaattgatgatttagctgtctagtaggttgggtggtgtggatataatgtgagaatttaaagacaaactttagtgatacaggaagattaaagtgcagctgatagttttctgctagatcttgaagctttacattttgtttgtttgtttgtttgtttttcttaaggcaacacagtacaatcttttttgaggtgattttttgttttgttttgtttttttgttttgtaacactaccaagaaattgagcattgctattggttttaatctgttttcttcaggcagttggtaactttagtgccaacatgttaagtgataactatgtcatttggctgctaaattctgtcattttttaaatgaaggtgaatttatgttacatatcaaaatttgtacatttgagtaacgttgttttagcgcttttgcaagaaaaagtttatttttataacatttgtgattttcatgtagaagattgaaacagatatctgtggttaacagtgctattgagtggtatggaacagtgttacttggcattttgagccttctcaggtttgtctcatcagtggtagcttaacaacctctggattgattgtgtataattgtctttgtattcaaaagaggttcatgtcctgtaaaagcacagtattgtttggctggagggagctgcagaatcgcccatgtttctgtgactttgctcgtgtgtgtgtgtgtgtgtgtgtgtgtgtgtgtgttccaggcatggcagccaaccttgtatctgctatttaaaataacagcagagcttcataattgtggtcattagagttgttcttatcataattaaaactgagattcaataaaactatgaaacatgt

SEQ ID NO: 488 - DNA, 1289 bp, Mus musculus
ttacctcactgctttccggagcggtagcacctcctccgccggcttcctcctcagaccgctttttgccgcgagccgaccggtcccgtcatgccgacccgcagtcccagcgtcgtgattagcgatgatgaaccaggttatgacctagatttgttttgtatacctaatcattatgccgaggatttggaaaaagtgtttattcctcatggactgattatggacaggactgaaagacttgctcgagatgtcatgaaggagatgggaggccatcacattgtggccctctgtgtgctcaaggggggctataagttctttgctgacctgctggattacattaaagcactgaatagaaatagtgatagatccattcctatgactgtagattttatcagactgaagagctactgtaatgatcagtcaacgggggacataaaagttattggtggagatgatctctcaactttaactggaaagaatgtcttgattgttgaagatataattgacactggtaaaacaatgcaaactttgctttccctggttaagcagtacagccccaaaatggttaaggttgcaagcttgctggtgaaaaggacctctcgaagtgttggatacaggccagactttgttggatttgaaattccagacaagtttgttgttggatatgcccttgactataatgagtacttcaggaatttgaatcacgtttgtgtcattagtgaaactggaaaagccaaatacaaagcctaagatgagcgcaagttgaatctgcaaatacgaggagtcctgttgatgttgccagtaaaattagcaggtgttctagtcctgtggccatctgcctagtaaagctttttgcatgaaccttctatgaatgttactgttttatttttagaaatgtcagttgctgcgtccccagacttttgatttgcactatgagcctataggccagcctaccctctggtagattgtcgcttatcttgtaagaaaaacaaatctcttaaattaccacttttaaataataatactgagattgtatctgtaagaaggatttaaagagaagctatattagttttttaattggtattttaatttttatatattcaggagagaaagatgtgattgatattgttaatttagacgagtctgaagctctcgatttcctatcagtaacagcatctaagaggttttgctcagtggaataaacatgtttcagcagtgttggctgtattttcccactttcagtaaatcgttgtcaacagttccttttaaatgcaaataaataaattctaaaaatt

SEQ ID NO: 489 - DNA, 1110 bp, Homo sapiens
gacagagcccgggccacggagctccttgccagctctcctcctcgcacagccgctcgaaccgcctgctgagccccatggcccgcgccacgctctccgccgcccccagcaatccccggctcctgcgggtggcgctgctgctcctgctcctggtggccgccagccggcgcgcagcaggagcgcccctggccactgaactgcgctgccagtgcttgcagaccctgcagggaattcacctcaagaacatccaaagtgtgaaggtgaagtcccccggaccccactgcgcccaaaccgaagtcatagccacactcaagaatgggcagaaagcttgtctcaaccccgcatcgcccatggttaagaaaatcatcgaaaagatgctgaaaaatggcaaatccaactgaccagaaggaaggaggaagcttattggtggctgttcctgaaggaggccctgccttacaggaacagaagaggaaagagagacacagctgcagaggccacctggcttgcgcctaatgtgtttgagcatacttaggagaagtcttctatttatttatttatttatttatttgtttgttttagaagattctatgttaatattttatgtgtaaaataaggttatgattgaatctacttgcacactctcccattatatttattgtttattttaggtcaaacccaagttagttcaatcctgattcatatttaatttgaagatagaaggtttgcagatattctctagtcatttgttaatatttcttcgtgatgacatatcacatgtcagccactgtgatagaggctgaggaatccaagaaaatggccagtaagatcaatgtgacggcagggaaatgtatgtgtgtctattttgtaactgtaaagatgaatgtcagttgttatttattgaaatgatttcacagtgtgtggtcaacatttctcatgttgaagctttaagaactaaaatgttctaaatatcccttggcattttatgtctttcttgtaagatactgccttgtttaatgttaattatgcagtgtttccctctgtgttagagcagagaggtttcgatatttattgatgttttcacaaagaacaggaaaataaaatatttaaaaatat

SEQ ID NO: 490 - DNA, 1166 bp, Homo sapiens
gctccgggaatttccctggcccggccgctccgggctttccagtctcaaccatgcataaaaagggttcgccgatcttggggagccacacagcccgggtcgcaggcacctccccgccagctctcccgcttctcgcacagcttcccgacgcgtctgctgagccccatggcccacgccacgctctccgccgcccccagcaatccccggctcctgcgggtggcgctgctgctcctgctcctggtggccgccagccggcgcgcagcaggagcgtccgtggtcactgaactgcgctgccagtgcttgcagacactgcagggaattcacctcaagaacatccaaagtgtgaatgtaaggtcccccggaccccactgcgcccaaaccgaagtcatagccacactcaagaatgggaagaaagcttgtctcaaccccgcatcccccatggttcagaaaatcatcgaaaagatactgaacaaggggagcaccaactgacaggagagaagtaagaagcttatcagcgtatcattgacacttcctgcagggtggtccctgcccttaccagagctgaaaatgaaaaagagaacagcagctttctagggacagctggaaaggacttaatgtgtttgactatttcttacgagggttctacttatttatgtatttatttttgaaagcttgtattttaatattttacatgctgttatttaaagatgtgagtgtgtttcatcaaacatagctcagtcctgattatttaattggaatatgatgggttttaaatgtgtcattaaactaatatttagtgggagaccataatgtgtcagccaccttgataaatgacagggtggggaactggagggtggggggattgaaatgcaagcaattagtggatcactgttagggtaagggaatgtatgtacacatctattttttatactttttttttaaaaaaagaatgtcagttgttatttattcaaattatctcacattatgtgttcaacatttttatgctgaagtttcccttagacattttatgtcttgcttgtagggcataatgccttgtttaatgtccattctgcagcgtttctctttcccttggaaaagagaatttatcattactgttacatttgtacaaatgacatgataataaaagttttatgaaaaaaaaaaaaaaa

SEQ ID NO: 491 - DNA, 879 bp, Homo sapiens
gcggagtctccaactgggagagctgcagctgccgagaggaggagaacgctgaggtcggtcggaccaacggacgcgctgaccgctgccaactgcagctcgcgctgcctcctgctcgcgccgtgccactaaggtcactcccgcctccgagagcccagagccgagatggaaacggtccaggagctgatccccctggccaaggagatgatggcccagaagcgcaaggggaagatggtgaagctgtacgtgctgggcagcgtgctggccctcttcggcgtggtgctcggcctgatggagactgtgtgcagccccttcacggccgccagacgtctgcgggaccaggaggcagccgtggcggagctgcaggccgccctggagcgacaggctctccagaagcaagccctgcaggagaaaggcaagcagcaggacacggtcctcggcggccgggccctgtccaaccggcagcacgcctcctaggaactgtgggagaccagcggagtgggagggagacgcagtagacagagacagaccgagaaggaagggagagacagagggggcgcgcgcacaggagcctgactccgctgggagagtgcaggagcacgtgctgttttttatttggacttaacttcagagaaaccgctgacatctagaactgacctaccacaagcatccaccaaaggagtttgggattgagttttgctgctgtgcagcactgcattgtcatgacatttccaacactgtgtgaattatctaaatgcgtctaccattttgcactagggaggaaggataaatgctttttatgttattattattaattattacaatgaccaccattttgcattttgaaataaaaaactttttataccaaaaaaaaaaaaaaaa

SEQ ID NO: 492 - DNA, 256 bp, Homo sapiens
tcagaggtgaaattggtaaccctggcagagatggtgctcgtgttgctcctggtgctgtaggtgcccctggtcctgctggagccacaggtgaccggggcgaagctggggctgctggtcctgctggtcctgctggtcctcggggaagccctggtgaacgtggtgaggtcggtcctgctggccccaatggatttgctggtcctgctggtgctgctggtcaacctggtgctaaaggagaaagaggagccaaagggcctaa

SEQ ID NO: 493 - DNA, 2943 bp, Homo sapiens
accaggcaacaccattgaaggctcatatgtaaaaatccatgccttcctttctcccaatctccattcccaaacttagccactggcttctggctgaggccttacgcatacctcccggggcttgcacacaccttcttctacagaagacacaccttgggcatatcctacagaagaccaggcttctctctggtccttggtagagggctactttactgtaacagggccagggtggagagttctctcctgaagctccatcccctctataggaaatgtgttgacaatattcagaagagtaagaggatcaagacttctttgtgctcaaataccactgttctcttctctaccctgccctaaccaggagcttgtcaccccaaactctgaggtgatttatgccttaatcaagcaaacttccctcttcagaaaagatggctcattttccctcaaaagttgccaggagctgccaagtattctgccaattcaccctggagcacaatcaacaaattcagccagaacacaactacagctactattagaactattattattaataaattcctctccaaatctagccccttgacttcggatttcacgatttctcccttcctcctagaaacttgataagtttcccgcgcttccctttttctaagactacatgtttgtcatcttataaagcaaaggggtgaataaatgaaccaaatcaataacttctggaatatctgcaaacaacaataatatcagctatgccatctttcactattttagccagtatcgagttgaatgaacatagaaaaatacaaaactgaattcttccctgtaaattccccgttttgacgacgcacttgtagccacgtagccacgcctacttaagacaattacaaaaggcgaagaagactgactcaggcttaagctgccagccagagagggagtcatttcattggcgtttgagtcagcaaagaagtcaagatggccaaagttccagacatgtttgaagacctgaagaactgttacagtgaaaatgaagaagacagttcctccattgatcatctgtctctgaatcagaaatccttctatcatgtaagctatggcccactccatgaaggctgcatggatcaatctgtgtctctgagtatctctgaaacctctaaaacatccaagcttaccttcaaggagagcatggtggtagtagcaaccaacgggaaggttctgaagaagagacggttgagtttaagccaatccatcactgatgatgacctggaggccatcgccaatgactcagaggaagaaatcatcaagcctaggtcagcaccttttagcttcctgagcaatgtgaaatacaactttatgaggatcatcaaatacgaattcatcctgaatgacgccctcaatcaaagtataattcgagccaatgatcagtacctcacggctgctgcattacataatctggatgaagcagtgaaatttgacatgggtgcttataagtcatcaaaggatgatgctaaaattaccgtgattctaagaatctcaaaaactcaattgtatgtgactgcccaagatgaagaccaaccagtgctgctgaaggagatgcctgagatacccaaaaccatcacaggtagtgagaccaacctcctcttcttctgggaaactcacggcactaagaactatttcacatcagttgcccatccaaacttgtttattgccacaaagcaagactactgggtgtgcttggcaggggggccaccctctatcactgactttcagatactggaaaaccaggcgtaggtctggagtctcacttgtctcacttgtgcagtgttgacagttcatatgtaccatgtacatgaagaagctaaatcctttactgttagtcatttgctgagcatgtactgagccttgtaattctaaatgaatgtttacactctttgtaagagtggaaccaacactaacatataatgttgttatttaaagaacaccctatattttgcatagtaccaatcattttaattattattcttcataacaattttaggaggaccagagctactgactatggctaccaaaaagactctacccatattacagatgggcaaattaaggcataagaaaactaagaaatatgcacaatagcagttgaaacaagaagccacagacctaggatttcatgatttcatttcaactgtttgccttctacttttaagttgctgatgaactcttaatcaaatagcataagtttctgggacctcagttttatcattttcaaaatggagggaataatacctaagccttcctgccgcaacagttttttatgctaatcagggaggtcattttggtaaaatacttcttgaagccgagcctcaagatgaaggcaaagcacgaaatgttattttttaattattatttatatatgtatttataaatatatttaagataattataatatactatatttatgggaaccccttcatcctctgagtgtgaccaggcatcctccacaatagcagacagtgttttctgggataagtaagtttgatttcattaatacagggcattttggtccaagttgtgcttatcccatagccaggaaactctgcattctagtacttgggagacctgtaatcatataataaatgtacattaattaccttgagccagtaattggtccgatctttgactcttttgccattaaacttacctgggcattcttgtttcaattccacctgcaatcaagtcctacaagctaaaattagatgaactcaactttgacaaccatgagaccactgttatcaaaactttcttttctggaatgtaatcaatgtttcttctaggttctaaaaattgtgatcagaccataatgttacattattatcaacaatagtgattgatagagtgttatcagtcataactaaataaagcttgcaacaaaattctctgacaaaaaaaaaaaaaaaa

SEQ ID NO: 494 - DNA, 1639 bp, Homo sapiens
acaaactttcagagacagcagagcacacaagcttctaggacaagagccaggaagaaaccaccggaaggaaccatctcactgtgtgtaaacatgacttccaagctggccgtggctctcttggcagccttcctgatttctgcagctctgtgtgaaggtgcagttttgccaaggagtgctaaagaacttagatgtcagtgcataaagacatactccaaacctttccaccccaaatttatcaaagaactgagagtgattgagagtggaccacactgcgccaacacagaaattattgtaaagctttctgatggaagagagctctgtctggaccccaaggaaaactgggtgcagagggttgtggagaagtttttgaagagggctgagaattcataaaaaaattcattctctgtggtatccaagaatcagtgaagatgccagtgaaacttcaagcaaatctacttcaacacttcatgtattgtgtgggtctgttgtagggttgccagatgcaatacaagattcctggttaaatttgaatttcagtaaacaatgaatagtttttcattgtaccatgaaatatccagaacatacttatatgtaaagtattatttatttgaatctacaaaaaacaacaaataatttttgaatataaggattttcctagatattgcacgggagaatatacaaatagcaaaattgggccaagggccaagagaatatccgaactttaatttcaggaattgaatgggtttgctagaatgtgatatttgaagcatcacataaaaatgatgggacaataaattttgccataaagtcaaatttagctggaaatcctggatttttttctgttaaatctggcaaccctagtctgctagccaggatccacaagtccttgttccactgtgccttggtttctcctttatttctaagtggaaaaagtattagccaccatcttacctcacagtgatgttgtgaggacatgtggaagcactttaagttttttcatcataacataaattattttcaagtgtaacttattaacctatttattatttatgtatttatttaagcatcaaatatttgtgcaagaatttggaaaaatagaagatgaatcattgattgaatagttataaagatgttatagtaaatttattttattttagatattaaatgatgttttattagataaatttcaatcagggtttttagattaaacaaacaaacaattgggtacccagttaaattttcatttcagataaacaacaaataattttttagtataagtacattattgtttatctgaaattttaattgaactaacaatcctagtttgatactcccagtcttgtcattgccagctgtgttggtagtgctgtgttgaattacggaataatgagttagaactattaaaacagccaaaactccacagtcaatattagtaatttcttgctggttgaaacttgtttattatgtacaaatagattcttataatattatttaaatgactgcatttttaaatacaaggctttatatttttaactttaagatgtttttatgtgctctccaaattttttttactgtttctgattgtatggaaatataaaagtaaatatgaaacatttaaaatataatttgttgtcaaagt

SEQ ID NO: 495 - DNA, 4180 bp, Homo sapiens
ccagggtgatgctgaagatgatgaccttcttccaaggcctctagagccatcagcctgtgccaggcaccctcgacttgcctagaggcccccaaaagttgcagtccacatcagaggcagagtcagaggcctccatgtcggaggcctcctctgaggacctggtgccacccctggaggctggggcagccccatatagggaggaggaagaggcggcgaagaagaagaaggagaagaagaagaagtccaaaggcctggccaatgtgttctgcgtcttcaccaaagggaagaagaagaagggtcagcccagctcagcggagcccgaggacgcagccgggtccaggcaggggctggatggcccgccccccacagtggaggagctgaaggcggcgctggagcgcgggcagctggaggcggcgcggccgctgctggcgctggagcgggagctggcggcggcggcggcggcgggcggtgtgagcgaggaggagctggtgcggcgccagagcaaggtggaggcgctgtacgagctgctgcgcgaccaggtgctgggcgtgctgcggcggccgctggaggcgccgcccgagcggctgcgccaggcgctggccgtggtggcggagcaggagcgcgaggaccgccaggcggcggcggcggggccggggacctcggggctggcggccacgcgcccgcggcgctggctgcagctgtggcggcgcggcgtggcggaggcggccgaggagcgcatgggccagcggccggccgcgggcgccgaggtccccgagagcgtctttctgcacttgggccgcaccatgaaggaggacctggaggccgtggtggagcggctgaagccgctgttccccgccgagttcggcgtcgtggcggcctacgccgagagctaccaccagcacttcgcggcccacctggccgccgtggcgcagttcgagctgtgcgagcgcgacacctacatgctgctgctctgggtgcagaacctctaccccaatgacatcatcaacagccccaagctggtgggtgagctgcagggtatggggctcgggagcctcctgccccccaggcagatccgactgctggaggccacattcctgtccagtgaggcggccaatgtgagggagttgatggaccgagctctggagctagaggcacggcgctgggctgaggatgtgcctccccagaggctggacggccactgccacagcgagctggccatcgacatcatccagatcacctcccaggcccaggccaaggccgagagcatcacgctggacttgggctcacagataaagcgggtgctgctggtggagctgcctgcgttcctgaggagctaccagcgcgcctttaatgaatttctggagagaggcaagcagctgacgaattacagggccaatgttattgccaacatcaacaactgcctgtccttccggatgtccatggagcagaattggcaggtaccccaggacaccctgagcctcctgctgggccccctgggtgagctcaagagccacggctttgacaccctgctccagaacctgcatgaggacctgaagccactgttcaagaggttcacgcacacccgctgggcggcccctgtggagaccctggaaaacatcatcgccactgtagacacgaggctgcctgagttctcagagctgcagggctgtttccgggaggagctcatggaggccttgcacctgcacctggtgaaggagtacatcatccaactcagcaaggggcgcctggtcctcaagacggccgagcagcagcagcagctggctgggtacatcctggccaatgctgacaccatccagcacttctgcacccagcacggctccccggcgacctggctgcagcctgctctccctacgctggccgagatcattcgcctgcaggaccccagtgccatcaagattgaggtggccacttatgccacctgctaccctgacttcagcaaaggccacctgagcgctatcctggccatcaaggggaacctatccaacagtgaggtcaagcgcatccggagcatcttggacgtcagcatgggggcgcaggagccctcccggcccctattttcccttataaaggttggttagcttttcctgtggcctgacctgcctgtgagtgcccagcaagccttgggcacaccccgctgggagctgttaagagcagcgctggttctcggttcctcccgggtctcctgtgctctgatgctacttctgcctagccctggcggaggtgcaggccctgtcagctggaactggacagaccttggtttgtttacatgtccgatgggggcaggagctcccatcctgggcagccaaccaggcaacaccaaggactctttgtaaacgatagctgatcgtgtgcacgcaaggaaagaaccaggagggagagtgcagccaggctcagggatccccggacacctctgtccagagcccctccacagtcggcctcatgactgtcctcctcgtgggtggggccgagggccctcttcagctctctggagacaggggccgagcctcacccatctgccctctgcagcccagggccgccgtgagcgggattcagcaatggtggaatggaagacagaactggaagagaaagaaggaaaagatgagctctcgtctggcaggggcttttagggtcctgtggcgagctgtgagcaccgccagcattagacgtcacatccaggtggccccacggcccctacaggctggccctgcaatggggccctgagccctccctcttcatcccccaaggcctcaactagagggtggtcccccgagggcttggtgtctactaccgaagggcccaagacctcctgggtcctctcaggctcccccttccccaaggcagggacaggccctgggggtgccaccgtgggccctgccacccagaagtctggctgaggtctgggcaggggcagggcaagcttgacctctcactgttgaccctttggcctctgtatttgtttcctattgccgtgacaggtttccacaaacttcgtggatcaaaacgaggtcttccagttctgcgggtcagaaggctgacccggggctcaaatctgggtgtcggcagtcctgcactccttctggaggctctaggggagaattcatttctggccttttcatttttagaggctgaccgtaattcttgacttcaggctcctccatcttcagagccagctgtgggtagttgaatctttttcccgtcacctcattgaggcctcccctctcctgcctccctccaccacttttttttttttttttttgagacagggtcttgctgtgttgcccaggctggagtgcagtggcctggtcatggcatcaaggctcactgcagcctggacctcctggttcaagtgatcctcttgtctcagtcccctgagacaatcccccacgcccagctacatattttttgtggatacagggtctcattctgttgcctaggcttgtctggaactcctgggctcaagggatcttgtagccttagcctcctaaagtgctgggattataggcatgagtcactgtacccggcctgctctaccgcttttaaggacgcttatgatcacattgcgcctacccagagaacccaggtcgtctttctattttcaggtcagctgattagccaccttagttccatctgcaactttagttcccactggctgtgtaacctaacatagtcacaggctctggggactgtcacgtggacatctttgggaggccgttattctgcccaccgcaccctccgttcatcccctgccctgccgggcacctcgctctaccccaggaaaatgtgagctcgttttcctgctcggcatgtgctccccctaaggctctgctcctccctgggcctgaaagttccttctcagcctgagagggggcccttcggactcaggcatgactcagcccggctgatgcctctgcagtgctgagtcaggatttggggccggctctcttgggtccgtccccttttcccaggtactgccttacaaagctgtggccaggaagtggccggtataaaggatgcccaaggtctttgtacgtgtgtaggagttagcgtgtttgatattgttaatataataataattattttttagagtactgcttttgtatgtatgttgaacaggatccaggtttttatagcttgatataaaacagaattcaaaagtgaaaaa

SEQ ID NO: 496 - DNA, 3387 bp, Homo sapiens
agggccacaggtgctgccaagatgctccagggcacctgctccgtgctcctgctctggggaatcctgggggccatccaggcccagcagcaggaggtcatctcgccggacactaccgagagaaacaacaactgcccagagaagaccgactgccccatccacgtgtacttcgtgctggacacctcggagagcgtcaccatgcagtcccccacggacatcctgctcttccacatgaagcagttcgtgccgcagttcatcagccagctgcagaacgagttctacctggaccaggtggcgctgagctggcgctacggcggcctgcacttctctgaccaggtggaggtgttcagcccaccgggcagcgaccgggcctccttcatcaagaacctgcagggcatcagctccttccgccgcggcaccttcaccgactgcgcgctggccaacatgacggagcagatccggcaggaccgcagcaagggcaccgtccacttcgccgtggtcatcaccgacggccacgtcaccggcagcccctgcgggggcatcaagctgcaggccgagcgggcccgcgaggagggcatccggctcttcgccgtggcccccaaccagaacctgaaggagcagggcctgcgggacatcgccagcacgccgcacgagctctaccgcaacgactacgccaccatgctgcccgactccaccgagatcaaccaggacaccatcaaccgcatcatcaaggtcatgaaacacgaagcctacggagagtgctacaaggtgagctgcctggaaatccctgggccctctgggcccaagggctaccgtggacagaagggtgccaagggcaacatgggtgagccgggagagcctggccagaagggaagacagggagacccgggcatcgaaggccccattggattcccaggacccaagggcgttcctggcttcaaaggagagaagggtgaatttggagccgacggtcgcaagggggcccctggcctggctggcaagaacgggaccgatggacagaagggcaagctggggcgcatcggacctcctggctgcaagggagaccctggaaaccggggccccgacggttacccgggggaagcagggagtccaggggagcgaggagaccaaggcggcaagggggaccctggccgcccaggacgcagagggcccccgggagaaatcggggccaagggaagcaaggggtatcaaggcaacaatggagccccaggaagtcctggtgtgaaaggagccaagggcgggcctgggccccgcggacccaaaggcgagccggggcgcaggggagaccccggcaccaagggcagcccaggcagcgatggccccaagggggagaagggggaccctggccctgagggcccccgcggcctggctggagaggttggcaacaaaggagccaagggagaccgaggcttgcctggacccagaggcccccagggagctcttggggagcccggaaagcagggatctcggggagaccccggtgatgcaggaccccgtggagactcaggacagccaggccccaagggagaccccggcaggcctggattcagctacccaggaccccgaggagcacccggagaaaaaggcgagcccggcccacgcggccccgagggaggccgaggcgactttggcttgaaaggagaacctgggaggaaaggagagaaaggagagcctgcggatcctggtccccctggtgagccaggccctcgggggccaagaggagtcccaggacccgagggtgagcccggcccccctggagaccccggtctcacggagtgtgacgtcatgacctacgtgagggagacctgcgggtgctgcgactgtgagaagcgctgtggcgccctggacgtggtcttcgtcatcgacagctccgagagcattgggtacaccaacttcacactggagaagaacttcgtcatcaacgtggtcaacaggctgggtgccatcgctaaggaccccaagtccgagacagggacgcgtgtgggcgtggtgcagtacagccacgagggcacctttgaggccatccagctggacgacgaacatatcgactccctgtcgagcttcaaggaggctgtcaagaacctcgagtggattgcgggcggcacctggacaccctcagccctcaagtttgcctacgaccgcctcatcaaggagagccggcgccagaagacacgtgtgtttgcggtggtcatcacggacgggcgccacgaccctcgggacgatgacctcaacttgcgggcgctgtgcgatcgcgacgtcacagtgacggccatcggcatcggggacatgttccacgagaagcacgagagtgaaaacctctactccatcgcctgcgacaagccacagcaggtgcgcaacatgacgctgttctccgacctggtcgctgagaagttcatcgatgacatggaggacgtcctctgcccggaccctcagatcgtgtgcccagaccttccctgccaaacagagctgtccgtggcacagtgcacgcagcggcccgtggacatcgtcttcctgctggacggctccgagcggctgggtgagcagaacttccacaaggcccggcgcttcgtggagcaggtggcgcggcggctgacgctggcccggagggacgacgaccctctcaacgcacgcgtggcgctgctgcagtttggtggccccggcgagcagcaggtggccttcccgctgagccacaacctcactgccatccacgaggcgctggagaccacacaatacctgaactccttctcgcacgtgggcgcaggcgtggtgcacgccatcaatgccatcgtgcgcagcccgcgtggcggggcccggaggcacgcagagctgtccttcgtgttcctcacggacggcgtcacgggcaacgacagtctgcacgagtcggcgcactccatgcgcaacgagaacgtggtacccaccgtcctggccttgggcagcgacgtggacatggacgtgctcaccacgctcagcctgggtgaccgcgccgccgtgttccacgagaaggactatgacagcctggcgcaacccggcttcttcgaccgcttcatccgctggatctgctagcgccgccgcccgggccccgcagtcgagggtcgtgagcccaccccgtccatggtgctaagcgggcccgggtcccacacggccagcaccgctgctcactcggacgacgccctgggcctgcacctctccagctcctcccacggggtccccgtagccccggcccccgcccagccccaggtctccccaggccctccgcaggctgcccggcctccctccccctgcagccatcccaaggctcctgacctacctggcccctgagctctggagcaagccctgacccaataaaggctttgaacccaaaaaaaaaaa

SEQ ID NO: 497 - DNA, 1908 bp, Homo sapiens
catttattaaggactctctgctccagcctctcactctcactctcctccgctcaaactcagctcacttgagagtctcctcccgccagctgtggaaagaactttgcgtctctccagcaatgcatctccttgcgattctgttttgtgctctctggtctgcagtgttggccgagaactcggatgattatgatctcatgtatgtgaatttggacaacgaaatagacaatggactccatcccactgaggaccccacgccgtgcgactgcggtcaggagcactcggaatgggacaagctcttcatcatgctggagaactcgcagatgagagagcgcatgctgctgcaagccacggacgacgtcctgcggggcgagctgcagaggctgcgggaggagctgggccggctcgcggaaagcctggcgaggccgtgcgcgccgggggctcccgcagaggccaggctgaccagtgctctggacgagctgctgcaggcgacccgcgacgcgggccgcaggctggcgcgtatggagggcgcggaggcgcagcgcccagaggaggcggggcgcgccctggccgcggtgctagaggagctgcggcagacgcgagccgacctgcacgcggtgcagggctgggctgcccggagctggctgccggcaggttgtgaaacagctattttattcccaatgcgttccaagaagatttttggaagcgtgcatccagtgagaccaatgaggcttgagtcttttagtgcctgcatttgggtcaaagccacagatgtattaaacaaaaccatcctgttttcctatggcacaaagaggaatccatatgaaatccagctgtatctcagctaccaatccatagtgtttgtggtgggtggagaggagaacaaactggttgctgaagccatggtttccctgggaaggtggacccacctgtgcggcacctggaattcagaggaagggctcacatccttgtgggtaaatggtgaactggcggctaccactgttgagatggccacaggtcacattgttcctgagggaggaatcctgcagattggccaagaaaagaatggctgctgtgtgggtggtggctttgatgaaacattagccttctctgggagactcacaggcttcaatatctgggatagtgttcttagcaatgaagagataagagagaccggaggagcagagtcttgtcacatccgggggaatattgttgggtggggagtcacagagatccagccacatggaggagctcagtatgtttcataaatgttgtgaaactccacttgaagccaaagaaagaaactcacacttaaaacacatgccagttgggaaggtctgaaaactcagtgcataataggaacacttgagactaatgaaagagagagttgagaccaatctttatttgtactggccaaatactgaataaacagttgaaggaaagacattggaaaaagcttttgaggataatgttactagactttatgccatggtgctttcagtttaatgctgtgtctctgtcagataaactctcaaataattaaaaaggactgtattgttgaacagagggacaattgttttacttttctttggttaattttgttttggccagagatgaattttacattggaagaataacaaaataagatttgttgtccattgttcattgttattggtatgtaccttattacaaaaaaaatgatgaaaacatatttatactacaaggtgacttaacaactataaatgtagtttatgtgttataatcgaatgtcacgtttttgagaagatagtcatataagttatattgcaaaagggatttgtattaatttaagactatttttgtaaagctctactgtaaataaaatattttataaaactaaaaaaaaaaaaaaaaaaaaaaaaaaaaaaaaaaaaa

SEQ ID NO: 498 - DNA, 1236 bp, Homo sapiens
acttggccttacactccgctcggctcaccatgtgtcactctcgcagctgccacccgaccatgaccatcctgcaggccccgaccccggccccctccaccatcccgggaccccggcggggctccggtcctgagatcttcaccttcgaccctctcccggagcccgcagcggcccctgccgggcgccccagcgcctctcgcgggcaccgaaagcgcagccgcagggttctctaccctcgagtggtccggcgccagctgccagtcgaggaaccgaacccagccaaaaggcttctctttctgctgctcaccatcgtcttctgccagatcctgatggctgaagagggtgtgccggcgcccctgcctccagaggacgcccctaacgccgcatccctggcgcccacccctgtgtcccccgtcctcgagccctttaatctgacttcggagccctcggactacgctctggacctcagcactttcctccagcaacacccggccgccttctaactgtgactccccgcactccccaaaaagaatccgaaaaaccacaaagaaacaccaggcgtacctggtgcgcgagagcgtatccccaactgggacttccgaggcaacttgaactcagaacactacagcggagacgccacccggtgcttgaggcgggaccgaggcgcacagagaccgaggcgcatagagaccgaggcacagcccagctggggctaggcccggtgggaaggagagcgtcgttaatttatttcttattgctcctaattaatatttatatgtatttatgtacgtcctcctaggtgatggagatgtgtacgtaatatttattttaacttatgcaagggtgtgagatgttccccctgctgtaaatgcaggtctcttggtatttattgagctttgtgggactggtggaagcaggacacctggaactgcggcaaagtaggagaagaaatggggaggactcgggtgggggaggacgtcccggctgggatgaagtctggtggtgggtcgtaagtttaggaggtgactgcatcctccagcatctcaactccgtctgtctactgtgtgagacttcggcggaccattaggaatgagatccgtgagatccttccatcttcttgaagtcgcctttagggtggctacgaggtagaggggtgggggttggtgggctgtcacggagcgactgtcgagatcgcctagtatgttctgtgaacacaaataaaattgatttactgtctgc

SEQ ID NO: 499 - DNA, 238 bp, Homo sapiens
tttttttaacgctcccaagatgtcacgtttattgcaactgagcagagacaggctgtgcggaccttcctcaatcccgtccaacccccagcccctccccaagcccccgctgcaactacgccggcaggtccgcagagtgttgcttgacagcgcgtggcggtgcccgtgagtcttaagacacctgccaagtctctggcgccgttcagtcataggtagagggactccatgagggcactgcccg

SEQ ID NO: 500 - DNA, 1518 bp, Homo sapiens
aaaacagcccggagcctgcagcccagccccacccagacccatggctggacctgccacccagagccccatgaagctgatggccctgcagctgctgctgtggcacagtgcactctggacagtgcaggaagccacccccctgggccctgccagctccctgccccagagcttcctgctcaagtgcttagagcaagtgaggaagatccagggcgatggcgcagcgctccaggagaagctggtgagtgagtgtgccacctacaagctgtgccaccccgaggagctggtgctgctcggacactctctgggcatcccctgggctcccctgagcagctgccccagccaggccctgcagctggcaggctgcttgagccaactccatagcggccttttcctctaccaggggctcctgcaggccctggaagggatctcccccgagttgggtcccaccttggacacactgcagctggacgtcgccgactttgccaccaccatctggcagcagatggaagaactgggaatggcccctgccctgcagcccacccagggtgccatgccggccttcgcctctgctttccagcgccgggcaggaggggtcctggttgcctcccatctgcagagcttcctggaggtgtcgtaccgcgttctacgccaccttgcccagccctgagccaagccctccccatcccatgtatttatctctatttaatatttatgtctatttaagcctcatatttaaagacagggaagagcagaacggagccccaggcctctgtgtccttccctgcatttctgagtttcattctcctgcctgtagcagtgagaaaaagctcctgtcctcccatcccctggactgggaggtagataggtaaataccaagtatttattactatgactgctccccagccctggctctgcaatgggcactgggatgagccgctgtgagcccctggtcctgagggtccccacctgggacccttgagagtatcaggtctcccacgtgggagacaagaaatccctgtttaatatttaaacagcagtgttccccatctgggtccttgcacccctcactctggcctcagccgactgcacagcggcccctgcatccccttggctgtgaggcccctggacaagcagaggtggccagagctgggaggcatggccctggggtcccacgaatttgctggggaatctcgtttttcttcttaagacttttgggacatggtttgactcccgaacatcaccgacgtgtctcctgtttttctgggtggcctcgggacacctgccctgcccccacgagggtcaggactgtgactctttttagggccaggcaggtgcctggacatttgccttgctggacggggactggggatgtgggagggagcagacaggaggaatcatgtcaggcctgtgtgtgaaaggaagctccactgtcaccctccacctcttcaccccccactcaccagtgtcccctccactgtcacattgtaactgaacttcaggataataaagtgtttgcctcca

SEQ ID NO: 501 - DNA, 328 bp, Homo sapiens
  misc_feature (107)..(107): n is a, c, g, or t
  misc_feature (197)..(197): n is a, c, g, or t
  misc_feature (277)..(277): n is a, c, g, or t
  misc_feature (302)..(302): n is a, c, g, or t
  misc_feature (320)..(320): n is a, c, g, or t
aagtcttcctaaattttattggcactgaaatagaacatggattgagcataaaccactccaaaaacaattttttaaaaaacccaaaaagtacacaaaaaacccctgantacaaaatctaaccttttcccccagcctccctaagggtaagttactgactttaaggcagctattaatagattgccccacaattccagggnttcaatttaggccaatatagggacatatcaccaagtgaggctaattcacaggcaatgcacacaagactcctcaagggcanggccagagtgggggggttgttggcnggggggggatttgggggngggtttta

SEQ ID NO: 502 - DNA, 356 bp, Homo sapiens
ttcaaactgaatggtaatttattaataaacaaacaatgaatatgttcaacaaaaagaaagaaaagaggatagaataagattaatacagtttccctttttataatgagaaaaaaagcacaatttaaagtttcaggcaatttaacgtcaggttttggggaacactttctggcgtttggtccacgacatccaactacaaattaaaaataaattactatgttgcaatttacattttaaaacaagtccatgaataaaaagaaagcgactttcataaaccggggactttccccctcccttcaacataggataaaataatatcttacaggtgagaggcaaggaagagggcaagagatggggag

SEQ ID NO: 503 - DNA, 1900 bp, Homo sapiens
acaactctcagaggagcattgcccgtcagacagcaactcagagaataaccagagaacaaccagattgaaacaatggaggatctttgtgtggcaaacacactctttgccctcaatttattcaagcatctggcaaaagcaagccccacccagaacctcttcctctccccatggagcatctcgtccaccatggccatggtctacatgggctccaggggcagcaccgaagaccagatggccaaggtgcttcagtttaatgaagtgggagccaatgcagttacccccatgactccagagaactttaccagctgtgggttcatgcagcagatccagaagggtagttatcctgatgcgattttgcaggcacaagctgcagataaaatccattcatccttccgctctctcagctctgcaatcaatgcatccacagggaattatttactggaaagtgtcaataagctgtttggtgagaagtctgcgagcttccgggaagaatatattcgactctgtcagaaatattactcctcagaaccccaggcagtagacttcctagaatgtgcagaagaagctagaaaaaagattaattcctgggtcaagactcaaaccaaaggcaaaatcccaaacttgttacctgaaggttctgtagatggggataccaggatggtcctggtgaatgctgtctacttcaaaggaaagtggaaaactccatttgagaagaaactaaatgggctttatcctttccgtgtaaactcggctcagcgcacacctgtacagatgatgtacttgcgtgaaaagctaaacattggatacatagaagacctaaaggctcagattctagaactcccatatgctggagatgttagcatgttcttgttgcttccagatgaaattgccgatgtgtccactggcttggagctgctggaaagtgaaataacctatgacaaactcaacaagtggaccagcaaagacaaaatggctgaagatgaagttgaggtatacataccccagttcaaattagaagagcattatgaactcagatccattctgagaagcatgggcatggaggacgccttcaacaagggacgggccaatttctcagggatgtcggagaggaatgacctgtttctttctgaagtgttccaccaagccatggtggatgtgaatgaggagggcactgaagcagccgctggcacaggaggtgttatgacagggagaactggacatggaggcccacagtttgtggcagatcatccttttctttttcttattatgcataagataaccaactgcattttatttttcggcagattttcctcaccctaaaactaagcgtgctgcttctgcaaaagatttttgtagatgagctgtgtgcctcagaattgctatttcaaattgccaaaaatttagagatgttttctacatatttctgctcttctgaacaacttctgctacccactaaataaaaacacagaaataattagacaattgtctattataacatgacaaccctattaatcatttggtcttctaaaatgggatcatgcccatttagattttccttactatcagtttatttttataacattaacttttactttgttatttattattttatataatggtgagtttttaaattattgctcactgcctatttaatgtagctaataaagttatagaagcagatgatctgttaatttcctatctaataaatgcctttaattgttctcataatgaagaataagtaggtaccctccatgcccttctgtaataaatatctggaaaaaacattaaacaataggcaaatatatgttatgtgcatttctagaaatacataacacatatatatgtctgtatcttatattcaattgcaagtatataataaataaacctgcttccaaacaac

SEQ ID NO: 504 - DNA, 400 bp, Homo sapiens
ctgccctcccttgtttccgctgcatccagacttcctcaggcggtggctggaggctgcgcatctggggctttaaacatacaaagggattgccaggacctgcggcggcggcggcggcggcgggggctggggcgcgggggccggaccatgagccgctgagccgggcaaaccccaggccaccgagccagcggaccctcggagcgcagccctgcgccgcggagcaggctccaaccaggcggcgaggcggccacacgcaccgagccagcgacccccgggcgacgcgcggggccagggagcgctacgatggaggcgctaatggcccggggcgcgctcacgggtcccctgagggcgctctgtctcctgggctgcctgctgagccacgccgccgccgcgccgtcgccca

SEQ ID NO: 505 - DNA, 799 bp, Homo sapiens
cactcccaaagaactgggtactcaacactgagcagatctgttctttgagctaaaaaccatgtgctgtaccaagagtttgctcctggctgctttgatgtcagtgctgctactccacctctgcggcgaatcagaagcagcaagcaactttgactgctgtcttggatacacagaccgtattcttcatcctaaatttattgtgggcttcacacggcagctggccaatgaaggctgtgacatcaatgctatcatctttcacacaaagaaaaagttgtctgtgtgcgcaaatccaaaacagacttgggtgaaatatattgtgcgtctcctcagtaaaaaagtcaagaacatgtaaaaactgtggcttttctggaatggaattggacatagcccaagaacagaaagaaccttgctggggttggaggtttcacttgcacatcatggagggtttagtgcttatctaatttgtgcctcactggacttgtccaattaatgaagttgattcatattgcatcatagtttgctttgtttaagcatcacattaaagttaaactgtattttatgttatttatagctgtaggttttctgtgtttagctatttaatactaattttccataagctattttggtttagtgcaaagtataaaattatatttgggggggaataagattatatggactttcttgcaagcaacaagctattttttaaaaaaactatttaacattcttttgtttatattgttttgtctcctaaattgttgtaattgcattataaaataagaaaaacattaataagacaaatatt

SEQ ID NO: 506 - DNA, 535 bp, Homo sapiens
gtcgcagctgttttaattcaatcccacgcccctgtccagcaggaaaccccttatagaaaacccaaatcctcatcttggagtttctccttcagccagggcagcacttgaaagaggttgatgtgaaagtctcgggcgtgacagagtacctgcttttgccgcttctggtttttgcagacatccactactccccagctgattacaccaacttgaatgaaacgacttctcttgtgaactatcaaggggccgccagaatcacctctgcaagtattggggtcagcatagggactcactcctccagtacaaaggaaccgaggggtgaccacctctgagatgtccttgactttgtcatagcctggggcatattgagcatctctctcacagctgcctttcttatccccattcttgatgtagacctccttccgagtcagctttttctcctcctcagacacaaacagagctttgatatcctgtgcagggagcaagctcttcttttgttgctggcaagtggtagttggaggaagcctcaagctcgagt

SEQ ID NO: 507 - DNA, 4465 bp, Homo sapiens
caattgtcatacgacttgcagtgagcgtcaggagcacgtccaggaactcctcagcagcgcctccttcagctccacagccagacgccctcagacagcaaagcctacccccgcgccgcgccctgcccgccgctcggatgctcgcccgcgccctgctgctgtgcgcggtcctggcgctcagccatacagcaaatccttgctgttcccacccatgtcaaaaccgaggtgtatgtatgagtgtgggatttgaccagtataagtgcgattgtacccggacaggattctatggagaaaactgctcaacaccggaatttttgacaagaataaaattatttctgaaacccactccaaacacagtgcactacatacttacccacttcaagggattttggaacgttgtgaataacattcccttccttcgaaatgcaattatgagttatgtcttgacatccagatcacatttgattgacagtccaccaacttacaatgctgactatggctacaaaagctgggaagccttctctaacctctcctattatactagagcccttcctcctgtgcctgatgattgcccgactcccttgggtgtcaaaggtaaaaagcagcttcctgattcaaatgagattgtggaaaaattgcttctaagaagaaagttcatccctgatccccagggctcaaacatgatgtttgcattctttgcccagcacttcacgcatcagtttttcaagacagatcataagcgagggccagctttcaccaacgggctgggccatggggtggacttaaatcatatttacggtgaaactctggctagacagcgtaaactgcgccttttcaaggatggaaaaatgaaatatcagataattgatggagagatgtatcctcccacagtcaaagatactcaggcagagatgatctaccctcctcaagtccctgagcatctacggtttgctgtggggcaggaggtctttggtctggtgcctggtctgatgatgtatgccacaatctggctgcgggaacacaacagagtatgcgatgtgcttaaacaggagcatcctgaatggggtgatgagcagttgttccagacaagcaggctaatactgataggagagactattaagattgtgattgaagattatgtgcaacacttgagtggctatcacttcaaactgaaatttgacccagaactacttttcaacaaacaattccagtaccaaaatcgtattgctgctgaatttaacaccctctatcactggcatccccttctgcctgacacctttcaaattcatgaccagaaatacaactatcaacagtttatctacaacaactctatattgctggaacatggaattacccagtttgttgaatcattcaccaggcaaattgctggcagggttgctggtggtaggaatgttccacccgcagtacagaaagtatcacaggcttccattgaccagagcaggcagatgaaataccagtcttttaatgagtaccgcaaacgctttatgctgaagccctatgaatcatttgaagaacttacaggagaaaaggaaatgtctgcagagttggaagcactctatggtgacatcgatgctgtggagctgtatcctgcccttctggtagaaaagcctcggccagatgccatctttggtgaaaccatggtagaagttggagcaccattctccttgaaaggacttatgggtaatgttatatgttctcctgcctactggaagccaagcacttttggtggagaagtgggttttcaaatcatcaacactgcctcaattcagtctctcatctgcaataacgtgaagggctgtccctttacttcattcagtgttccagatccagagctcattaaaacagtcaccatcaatgcaagttcttcccgctccggactagatgatatcaatcccacagtactactaaaagaacgttcgactgaactgtagaagtctaatgatcatatttatttatttatatgaaccatgtctattaatttaattatttaataatatttatattaaactccttatgttacttaacatcttctgtaacagaagtcagtactcctgttgcggagaaaggagtcatacttgtgaagacttttatgtcactactctaaagattttgctgttgctgttaagtttggaaaacagtttttattctgttttataaaccagagagaaatgagttttgacgtctttttacttgaatttcaacttatattataagaacgaaagtaaagatgtttgaatacttaaacactatcacaagatggcaaaatgctgaaagtttttacactgtcgatgtttccaatgcatcttccatgatgcattagaagtaactaatgtttgaaattttaaagtacttttggttatttttctgtcatcaaacaaaaacaggtatcagtgcattattaaatgaatatttaaattagacattaccagtaatttcatgtctactttttaaaatcagcaatgaaacaataatttgaaatttctaaattcatagggtagaatcacctgtaaaagcttgtttgatttcttaaagttattaaacttgtacatataccaaaaagaagctgtcttggatttaaatctgtaaaatcagatgaaattttactacaattgcttgttaaaatattttataagtgatgttcctttttcaccaagagtataaacctttttagtgtgactgttaaaacttccttttaaatcaaaatgccaaatttattaaggtggtggagccactgcagtgttatctcaaaataagaatattttgttgagatattccagaatttgtttatatggctggtaacatgtaaaatctatatcagcaaaagggtctacctttaaaataagcaataacaaagaagaaaaccaaattattgttcaaatttaggtttaaacttttgaagcaaacttttttttatccttgtgcactgcaggcctggtactcagattttgctatgaggttaatgaagtaccaagctgtgcttgaataacgatatgttttctcagattttctgttgtacagtttaatttagcagtccatatcacattgcaaaagtagcaatgacctcataaaatacctcttcaaaatgcttaaattcatttcacacattaattttatctcagtcttgaagccaattcagtaggtgcattggaatcaagcctggctacctgcatgctgttccttttcttttcttcttttagccattttgctaagagacacagtcttctcatcacttcgtttctcctattttgttttactagttttaagatcagagttcactttctttggactctgcctatattttcttacctgaacttttgcaagttttcaggtaaacctcagctcaggactgctatttagctcctcttaagaagattaaaagagaaaaaaaaaggcccttttaaaaatagtatacacttattttaagtgaaaagcagagaattttatttatagctaattttagctatctgtaaccaagatggatgcaaagaggctagtgcctcagagagaactgtacggggtttgtgactggaaaaagttacgttcccattctaattaatgccctttcttatttaaaaacaaaaccaaatgatatctaagtagttctcagcaataataataatgacgataatacttcttttccacatctcattgtcactgacatttaatggtactgtatattacttaatttattgaagattattatttatgtcttattaggacactatggttataaactgtgtttaagcctacaatcattgatttttttttgttatgtcacaatcagtatattttctttggggttacctctctgaatattatgtaaacaatccaaagaaatgattgtattaagatttgtgaataaatttttagaaatctgattggcatattgagatatttaaggttgaatgtttgtccttaggataggcctatgtgctagcccacaaagaatattgtctcattagcctgaatgtgccataagactgaccttttaaaatgttttgagggatctgtggatgcttcgttaatttgttcagccacaatttattgagaaaatattctgtgtcaagcactgtgggttttaatatttttaaatcaaacgctgattacagataatagtatttatataaataattgaaaaaaattttcttttgggaagagggagaaaatgaaataaatatcattaaagataactcaggagaatcttctttacaattttacgtttagaatgtttaaggttaagaaagaaatagtcaatatgcttgtataaaacactgttcactgttttttttaaaaaaaaaacttgatttgttattaacattgatctgctgacaaaacctgggaatttgggttgtgtatgcgaatgtttcagtgcctcagacaaatgtgtatttaacttatgtaaaagataagtctggaaataaatgtctgtttatttttgtactattta

SEQ ID NO: 508 - DNA, 2064 bp, Homo sapiens
agaaggcagacgcatcccgaactcgctggaggacaaggctcagctcttgccaggccaaattgagacatgtctgacacaagcgagagtggtgcaggtctaactcgcttccaggctgaagcttcagaaaaggacagtagctcgatgatgcagactctgttgacagtgacccagaatgtggaggtcccagagacaccgaaggcctcaaaggcactggaggtctcagaggatgtgaaggtctcaaaagcctctggggtctcaaaggccacagaggtctcaaagacctcagaggctcgggaggcacctgccacccaggcctcgtctactactcagctgactgatacccaggttctggcagctgaaaacaagagtctagcagctgacaccaagaaacagaatgctgacccgcaggctgtgacaatgcctgccactgagaccaaaaaggtcagccatgtggctgatacgaaggtcaatacaaaggctcaggagactgaggctgcaccctctcaggccccagcagatgaacctgagcctgagagtgcagctgcccagtctcaggagaatcaggatactcggcccaaggtcaaagccaagaaagcccgaaaggtgaagcatctggatggggaagaggatggcagcagtgatcagagtcaggcttctggaaccacaggtggccgaagggtctcaaaggctctaatggcctcaatggcccgcagggcttcaaggggtcccatagccttttgggcccgcagggcatcaaggactcggttggctgcttgggcccggagagccttgctctccctgagatcacctaaagcccgtaggggcaaggctcgccgtagagctgccaagctccagtcatcccaagagcctgaagcaccaccacctcgggatgtggcccttttgcaagggagggcaaatgatttggtgaagtaccttttggctaaagaccagacgaagattcccatcaagcgctcggacatgctgaaggacatcatcaaagaatacactgatgtgtaccccgaaatcattgaacgagcaggctattctttggagaaggtatttgggattcaattgaaggaaattgataagaatgaccacttgtacattcttctcagcaccttagagcccactgatgcaggcatactgggaacgactaaggactcacccaagctgggtctgctcatggtgcttcttagcatcatcttcatgaatggaaatcggtccagtgaggctgtcatctgggaggtgctgcgcaagttggggctgcgccctgggatacatcattcactctttggggacgtgaagaagctcatcactgatgagtttgtgaagcagaagtacctggactatgccagagtccccaatagcaatccccctgaatatgagttcttctggggcctgcgctcttactatgagaccagcaagatgaaagtcctcaagtttgcctgcaaggtacaaaagaaggatcccaaggaatgggcagctcagtaccgagaggcgatggaagcggatttgaaggctgcagctgaggctgcagctgaagccaaggctagggccgagattagagctcgaatgggcattgggctcggctcggagaatgctgccgggccctgcaactgggacgaagctgatatcggaccctgggccaaagcccggatccaggcgggagcagaagctaaagccaaagcccaagagagtggcagtgccagcactggtgccagtaccagtaccaataacagtgccagtgccagtgccagcaccagtggtggcttcagtgctggtgccagcctgaccgccactctcacatttgggctcttcgctggccttggtggagctggtgccagcaccagtggcagctctggtgcctgtggtttctcctacaagtgagattttagatattgttaatcctgccagtctttctcttcaagccagggtgcatcctcagaaacctactcaacacagcactctaggcagccactatcaatcaattgaagttgacactctgcattaaatctatttgccatttcaaaaaaaaaaaaaaaaaaaaaaaaaaaaaaaaaaaaa

SEQ ID NO: 509 - DNA, 717 bp, Homo sapiens
ttttttttttcataaattccttttaatcaattccttttctttccatcttactacatgcttttgtcacttcattaagtagatactatgtgccagtttttctgctaggtcctgataactgttaagatgaacaagacagggtttctagttccaaggagcacagaatctggtggagacagcagatatgccagtgaaggattatgacagaaggtgactgagcctcctgtaaatatgagcagcactctgttttctcctgacctcatattgcgttcccacagcagctccgaggctgttctcagtgtatgctgatcttcacttttattgagtgttttctcaacatttctggtcccagtcgcctctgcaggggagtctcttccactagcgtgtttctgtttccagccctcaatggatacctcttcggaaacttcccggagcctgatatgtgtgttggagaatctgtgtcctggcacctatttggaatggggaatgaaatagacatccattctatctatttctatggtaacaccttcatcagcagagggcatcggactgatgtcgtcaacctgttcccagccaccttccttacaacagaaatgatagccgagaatcctgggaagtggatgataacctgccaggtcagcgaccacctggccacggagtacgtgttctcggatttcttgctgaaggagcccacggagcccaagttcaaggggctgcgac

SEQ ID NO: 510 - DNA, 817 bp, Homo sapiens
gaaccgtttactcgctgctgtgcccatctatcagcaggctccgggctgaagattgcttctcttctctcctccaaggtctagtgacggagcccgcgcgcggcgccaccatgcggcagaaggcggtatcgcttttcttgtgctacctgctgctcttcacttgcagtggggtggaggcaggtaagaaaaagtgctcggagagctcggacagcggctccgggttctggaaggccctgaccttcatggccgtcggaggaggactcgcagtcgccgggctgcccgcgctgggcttcaccggcgccggcatcgcggccaactcggtggctgcctcgctgatgagctggtctgcgatcctgaatgggggcggcgtgcccgccggggggctagtggccacgctgcagagcctcggggctggtggcagcagcgtcgtcataggtaatattggtgccctgatgggctacgccacccacaagtatctcgatagtgaggaggatgaggagtagccagcagctcccagaacctcttcttccttcttggcctaactcttccagttaggatctagaactttgcctttttttttttttttttttttttttgagatgggttctcactatattgtccaggctagagtgcagtggctattcacagatgcgaacatagtacactgcagcctccaactcctagcctcaagtgatcctcctgtctcaacctcccaagtaggattacaagcatgcgccgacgatgcccagaatccagaactttgtctatcactctccccaacaacctagatgtgaaaacagaataaacttcacccagaaaa

SEQ ID NO: 511 - DNA, 1757 bp, Homo sapiens
caagcttggcacgagggcaggcattgcccgagccagccgagccgccagagccgcgggccgcgcgggtgtcgcgggcccaaccccaggatgctcccctgcgcctcctgcctacccgggtctctactgctctgggcgctgctactgttgctcttgggatcagcttctcctcaggattctgaagagcccgacagctacacggaatgcacagatggctatgagtgggacccagacagccagcactgccgggatgtcaacgagtgtctgaccatccctgaggcctgcaagggggaaatgaagtgcatcaaccactacgggggctacttgtgcctgccccgctccgctgccgtcatcaacgacctacacggcgagggacccccgccaccagtgcctcccgctcaacaccccaacccctgcccaccaggctatgagcccgacgatcaggacagctgtgtggatgtggacgagtgtgcccaggccctgcacgactgtcgccccagccaggactgccataacttgcctggctcctatcagtgcacctgccctgatggttaccgcaagatcgggcccgagtgtgtggacatagacgagtgccgctaccgctactgccagcaccgctgcgtgaacctgcctggctccttccgctgccagtgcgagccgggcttccagctggggcctaacaaccgctcctgtgttgatgtgaacgagtgtgacatgggggccccatgcgagcagcgctgcttcaactcctatgggaccttcctgtgtcgctgccaccagggctatgagctgcatcgggatggcttctcctgcagtgatattgatgagtgtagctactccagctacctctgtcagtaccgctgcgtcaacgagccaggccgtttctcctgccactgcccacagggttaccagctgctggccacacgcctctgccaagacattgatgagtgtgagtctggtgcgcaccagtgctccgaggcccaaacctgtgtcaacttccatgggggctaccgctgcgtggacaccaaccgctgcgtggagccctacatccaggtctctgagaaccgctgtctctgcccggcctccaaccctctatgtcgagagcagccttcatccattgtgcaccgctacatgaccatcacctcggagcggagagtacccgctgacgtgttccagatccaggcgacctccgtctaccccggtgcctacaatgcctttcagatccgtgctggaaactcgcagggggacttttacattaggcaaatcaacaacgtcagcgccatgctggtcctcgcccggccggtgacgggcccccgggagtacgtgctggacctggagatggtcaccatgaattccctcatgagctaccgggccagctctgtactgaggctcaccgtctttgtaggggcctacaccttctgaggagcaggagggagccaccctccctgcagctaccctagctgaggagcctgttgtgaggggcagaatgagaaaggcccaggggcccccattgacaggagctgggagctctgcaccacgagcttcagtcaccccgagaggagaggaggtaacgaggagggcggactccaggccccggcccagagatttggacttggctggcttgcaggggtcctaagaaactccactctggacagcgccaggaggccctgggttccattcctaactctgcctcaaactgtacatttggataagccctagtagttccctgggcctgtttttctataaaacgaggcaactgg

SEQ ID NO: 512 - DNA, 4573 bp, Homo sapiens
cgcgtgtctacgcggacgcaccggctaagctgcttctgccgccgccggccgcctgggaccttgcggtgaggctgcgcggggccgaggccgcctccgagcgccaggtttattcagtcaccatgaagctgctgctgctgcacccggccttccagagctgcctcctgctgaccctgcttggcttatggagaaccacccctgaggctcacgcttcatccctgggtgcaccagctatcagcgctgcctccttcctgcaggatctaatacatcggtatggcgagggtgacagcctcactctgcagcagctgaaggccctgctcaaccacctggatgtgggagtgggccggggtaatgtcacccagcacgtgcaaggacacaggaacctctccacgtgctttagttctggagacctcttcactgcccacaatttcagcgagcagtcgcggattgggagcagcgagctccaggagttctgccccaccatcctccagcagctggattcccgggcctgcacctcggagaaccaggaaaacgaggagaatgagcagacggaggaggggcggccaagcgctgttgaagtgtggggatacggtctcctctgtgtgaccgtcatctccctctgctccctcctgggggccagcgtggtgcccttcatgaagaagaccttttacaagaggctgctgctctacttcatagctctggcgattggaaccctctactccaacgccctcttccagctcatcccggaggcatttggtttcaaccctctggaagattattatgtctccaagtctgcagtggtgtttgggggcttttatcttttctttttcacagagaagatcttgaagattcttcttaagcagaaaaatgagcatcatcatggacacagccattatgcctctgagtcgcttccctccaagaaggaccaggaggagggggtgatggagaagctgcagaacggggacctggaccacatgattcctcagcactgcagcagtgagctggacggcaaggcgcccatggtggacgagaaggtcattgtgggctcgctctctgtgcaggacctgcaggcttcccagagtgcttgctactggctgaaaggtgtccgctactctgatatcggcactctggcctggatgatcactctgagcgacggcctccacaatttcatcgatggcctggccatcggtgcttccttcactgtgtcagttttccaaggcatcagcacctcggtggccatcctctgtgaggagttcccacatgagctaggagactttgtcatcctgctcaacgctgggatgagcatccaacaagctctcttcttcaacttcctttctgcctgctgctgctacctgggtctggcctttggcatcctggccggcagccacttctctgccaactggatttttgcgctagctggaggaatgttcttgtatatttctctggctgatatgttccctgagatgaatgaggtctgtcaagaggatgaaaggaagggcagcatcttgattccatttatcatccagaacctgggcctcctgactggattcaccatcatggtggtcctcaccatgtattcaggacagatccagattgggtagggctctgccaagagcctgtgggactggaagtcgggccctgggctgcccgatcgccagcccgaggacttaccatccacaatgcaccacggaagaggccgttctatgaaaaactgacacagactgtattcctgcattcaaatgtcagccgtttgtaaaatgctgtatcctaggaataagctgccctggtaaccagtctctagctagtgcctcttgccctctcctcacctccttttctctcagtgactctggaacctgaatgcagcttacaagacaagcctgacttttttctctgattaccttggcctcctcttggaaccagtgctgaaaggttttgaatcctttacccaacaatgcaaaaatagagccaatggttataacttggctagaaatatcaagagttgaatccatagtgtggggcccatgactctagctgggcaccttggacctccagctggccaatagaagagacaggagacaggaagccttcccattttttcaaagtctgtttaattgcctattacttctctcaaagagaacctgaagtcagaacacatgagcagggtgagaggtgaggcaaggttcatcctgaatgggagaggaagtcgaaccactgctgtgtgtcttgtcaggatgctcacttgttcctactgagatgctggatattgattttgtaacagcacctggtgtttcacggctgtccgagtgagctaacgtggcggtgtggctgcctggacctcctctttcaggttaacgctgacagaatggaggctcaggctgtctgcaagaaaacagttggtttggctgtgattttgacctcctcttccccactgccatcttctaagagactttgtagctgcctcctagaagcacattctgagcacatttgagacctctgtgttagaggggagactgcacaaactatcctcccccaggttgagacgtctgcagagtggcaagctgacttgtagaaatggggtgccatttatgctctacttagacaagggtaatcagaaatggaatcagtgcaggcaaaatttaggatttgccgcttccataaatcaaagcatgactaatagggggtctctgaaatgtaagggcacaaacttcacttagggcatcgcagatgtttgcagaatggttggcctaatgattatgctacagatgggttttaaatgacccgtctaggttactgcttccttgcaaaaaaagtcgaatcctgcattgaattgaatatgaatttctctaactctctccagaaaatggatggagataacttgtctttaaaactgtaggccagccttagccactgtggagcccttgcctccgagctctggcttcaaggggagctcttctccaggttcactaggtgaattgatttattattatcatattgataatgtgagattctttagccactttggggagcctgtctctccagaagcctttcttagtggtgcccacagttggagcccaggggccatgtttgcaaactgattcatgtgcatggctgacaggagtactggttcactaccaatgcctgagcttttctcttacatagaaaaactgtccactctcagtaatcacaagcagcatccgttttgttttctcttcttgggagacatctgtcaaaccaggaatattcttgaaaagaacgtgagcaggaaaaactgctggtgatactttttttaagttttgtttttatcttgcctgttggcttcaatacatttgagaatacgctgaagagggaaaatttcagtgatggagattctagattaaatatcaggactgatttcctggtgggattatggtccagttttaccaaagaaccaattccttgaatgttggaatctaactttttatattgtcattattattgttgtttttaaacggttctttgtcttttctgttttatttttctcaagctgctttcaggagctagcagaaaataactcaaagttgaagactctggaagattttgctttaacctaactcgcattgatgtattaaatttataattttagcattcccaatagatcctatcattccttaaacataataccctttgtcttggagtagaatactaagttagagttagtggatttctagtttaggagaggagctcaaaactataatctttaacaaattgaaaaatgaaatagggtgttttccctttttgtgcacacctatattaccttaagaaatttccttccatagacagctgcctcaaagggaaatcctctttaaaccgtagttggcgcagaggtcagtcctagtcggagcttaggaggggcggagacgctcacatcgtctgacttgagtcgccactgattgtggcaacagctttgcctcatgagtcaaaaattggcaatttcttttgatttttagttgttgaatttgctgtttcaagcatttgtacatattagaagtctaaggagtagcaagtcagtgggaggactttttcacccctggcattagcagcttcgacctcattttccagatgcaccagctcctattaataagttagcaaggaaagtgtatgtcacgtgcaggaacagtgaggcagggacaggggttctgctccttctcacttcaccaccggcacacagcttgcccctgtctttgcccccaaaggtattttgtgtctagtgtcaaattggagctattcttcactggtccttaaccttgggttttaaaaagaaggcttctctgtttgggtagcgtaagagctgagtatagtaagtcctcttccaaagagatggcaatatgctgggcatctactttaaaacaaagttgtctgatttttgcaagagaggttaggattttattgttcttatttccctttacagttctgcagttccatcacagtatttttttaaataactcaggtgtatgagcagaaattagaaaagaaaattaacttatgtggactgtaaatgttttatttgtaagattctataaataaagctatattctgt

SEQ ID NO: 513 - DNA, 1545 bp, Homo sapiens
gccgaggggggcgtacggaggtggcagctgtgggaggaggcggcgtggaaggccgaggagctcaagcccggaccaatccccacgttccgggccgcgaccctgaccctgcagcgtaccgggaagcgaaaccggccggatgggccgctgagcccgaatcgggcactgtgtggagccccctggagctgagatcaggatgttccgcttcatgagggacgtggagcctgaggatcccatgttcctgatggatccctttgctattcaccgtcagcatatgagccgtatgttgtcaggtggctttggatatagccccttcctcagcatcacagatggcaacatgccagggaccaggcctgccagccgccggatgcagcaggctggagctgtctccccctttgggatgctgggaatgtcgggtggtttcatggacatgtttgggatgatgaatgacatgattggaaacatggaacacatgacagctggaggcaattgccagaccttctcatcttccactgtcatctcctactccaatacgggtgatggtgcccccaaggtctaccaagagacatcagagatgcgctcggcaccaggcgggatccgggagacacggaggactgttcgggattcagacagtggactggagcagatgtccattgggcatcacatccgggacagggctcacatcctccagcgctcccgaaaccatcgcacgggggaccaggaggagcggcaggactatatcaacctggatgagagtgaggccgcagcgtttgatgacgagtggcggcgggagacctcccgattccggcagcagcgtcccctggagtttcggcggcttgagtcctcaggggctgggggacgaagggcggaggggcctccccgcctggccatccagggacctgaggactccccttcccgacagtcccgccgctatgactggtgaggccccgggccctcagcctctcttgtacaggctgagaggctgagaaatcatcccctgaataactttttcctctcgattcccatccccaatttaatattaaattaacaggcaagccggcccccacctctccctgggggtctcagggagaacctttcacggcaccctttccctaccttttccttctttaatctcctggtttaccattgatgacttcgcctctgcatctactgacttgatttttcattctgccactccatcttcaaaccccctcacctttcccatcctactcctgccatgcattgaagggtcaatgcattttggggtgagctctgggtttaggggccccctccatccctcagctaccctggatctttgcccacctcttcctcagagcccccactgaggggccgtagccctatctagggctgtggaaggagcagactggttcctaactctctccctcctcctgcccacacacatcaaaagaatcttccctacacccttctctgcctttattttttgatttgtgcaacttgtaactaggtgtttatggaataaaggagaatggaaaaaagaaaaaaaaaaaaaaaaaaaaaaaaaaaaaa

SEQ ID NO: 514 - DNA, 6803 bp, Homo sapiens
cggccccagaaaacccgagcgagtagggggcggcgcgcaggagggaggagaactgggggcgcgggaggctggtgggtgtcgggggtggagatgtagaagatgtgacgccgcggcccggcgggtgccagattagcggacgcgctgcccgcggttgcaacgggatcccgggcgctgcagcttgggaggcggctctccccaggcggcgtccgcggagacacccatccgtgaaccccaggtcccgggccgccggctcgccgcgcaccaggggccggcggacagaagagcggccgagcggctcgaggctgggggaccgcgggcgcggccgcgcgctgccgggcgggaggctggggggccggggccggggccgtgccccggagcgggtcggaggccggggccggggccgggggacggcggctccccgcgcggctccagcggctcggggatcccggccgggccccgcagggaccatggcagccgggagcatcaccacgctgcccgccttgcccgaggatggcggcagcggcgccttcccgcccggccacttcaaggaccccaagcggctgtactgcaaaaacgggggcttcttcctgcgcatccaccccgacggccgagttgacggggtccgggagaagagcgaccctcacatcaagctacaacttcaagcagaagagagaggagttgtgtctatcaaaggagtgtgtgctaaccgttacctggctatgaaggaagatggaagattactggcttctaaatgtgttacggatgagtgtttcttttttgaacgattggaatctaataactacaatacttaccggtcaaggaaatacaccagttggtatgtggcactgaaacgaactgggcagtataaacttggatccaaaacaggacctgggcagaaagctatactttttcttccaatgtctgctaagagctgattttaatggccacatctaatctcatttcacatgaaagaagaagtatattttagaaatttgttaatgagagtaaaagaaaataaatgtgtatagctcagtttggataattggtcaaacaattttttatccagtagtaaaatatgtaaccattgtcccagtaaagaaaaataacaaaagttgtaaaatgtatattctcccttttatattgcatctgctgttacccagtgaagcttacctagagcaatgatctttttcacgcatttgctttattcgaaaagaggcttttaaaatgtgcatgtttagaaacaaaatttcttcatggaaatcatatacattagaaaatcacagtcagatgtttaatcaatccaaaatgtccactatttcttatgtcattcgttagtctacatgtttctaaacatataaatgtgaatttaatcaattcctttcatagttttataattctctggcagttccttatgatagagtttataaaacagtcctgtgtaaactgctggaagttcttccacagtcaggtcaattttgtcaaacccttctctgtacccatacagcagcagcctagcaactctgctggtgatgggagttgtattttcagtcttcgccaggtcattgagatccatccactcacatcttaagcattcttcctggcaaaaatttatggtgaatgaatatggctttaggcggcagatgatatacatatctgacttcccaaaagctccaggatttgtgtgctgttgccgaatactcaggacggacctgaattctgattttataccagtctcttcaaaaacttctcgaaccgctgtgtctcctacgtaaaaaaagagatgtacaaatcaataataattacacttttagaaactgtatcatcaaagattttcagttaaagtagcattatgtaaaggctcaaaacattaccctaacaaagtaaagttttcaatacaaattctttgccttgtggatatcaagaaatcccaaaatattttcttaccactgtaaattcaagaagcttttgaaatgctgaatatttctttggctgctacttggaggcttatctacctgtacatttttggggtcagctctttttaacttcttgctgctctttttcccaaaaggtaaaaatatagattgaaaagttaaaacattttgcatggctgcagttcctttgtttcttgagataagattccaaagaacttagattcatttcttcaacaccgaaatgctggaggtgtttgatcagttttcaagaaacttggaatataaataattttataattcaacaaaggttttcacattttataaggttgatttttcaattaaatgcaaatttgtgtggcaggatttttattgccattaacatatttttgtggctgctttttctacacatccagatggtccctctaactgggctttctctaattttgtgatgttctgtcattgtctcccaaagtatttaggagaagccctttaaaaagctgccttcctctaccactttgctggaaagcttcacaattgtcacagacaaagatttttgttccaatactcgttttgcctctatttttcttgtttgtcaaatagtaaatgatatttgcccttgcagtaattctactggtgaaaaacatgcaaagaagaggaagtcacagaaacatgtctcaattcccatgtgctgtgactgtagactgtcttaccatagactgtcttacccatcccctggatatgctcttgttttttccctctaatagctatggaaagatgcatagaaagagtataatgttttaaaacataaggcattcatctgccatttttcaattacatgctgacttcccttacaattgagatttgcccataggttaaacatggttagaaacaactgaaagcataaaagaaaaatctaggccgggtgcagtggctcatgcctatattccctgcactttgggaggccaaagcaggaggatcgcttgagcccaggagttcaagaccaacctggtgaaaccccgtctctacaaaaaaacacaaaaaatagccaggcatggtggcgtgtacatgtggtctcagatacttgggaggctgaggtgggagggttgatcacttgaggctgagaggtcaaggttgcagtgagccataatcgtgccactgcagtccagcctaggcaacagagtgagactttgtctcaaaaaaagagaaattttccttaataagaaaagtaatttttactctgatgtgcaatacatttgttattaaatttattatttaagatggtagcactagtcttaaattgtataaaatatcccctaacatgtttaaatgtccatttttattcattatgctttgaaaaataattatggggaaatacatgtttgttattaaatttattattaaagatagtagcactagtcttaaatttgatataacatctcctaacttgtttaaatgtccatttttattctttatgcttgaaaataaattatggggatcctatttagctcttagtaccactaatcaaaagttcggcatgtagctcatgatctatgctgtttctatgtcgtggaagcaccggatgggggtagtgagcaaatctgccctgctcagcagtcaccatagcagctgactgaaaatcagcactgcctgagtagttttgatcagtttaacttgaatcactaactgactgaaaattgaatgggcaaataagtgcttttgtctccagagtatgcgggagacccttccacctcaagatggatatttcttccccaaggatttcaagatgaattgaaatttttaatcaagatagtgtgctttattctgttgtattttttattattttaatatactgtaagccaaactgaaataacatttgctgttttataggtttgaagaacataggaaaaactaagaggttttgtttttatttttgctgatgaagagatatgtttaaatatgttgtattgttttgtttagttacaggacaataatgaaatggagtttatatttgttatttctattttgttatatttaataatagaattagattgaaataaaatataatgggaaataatctgcagaatgtgggtttcctggtgtttcctctgactctagtgcactgatgatctctgataaggctcagctgctttatagttctctggctaatgcagcagatactcttcctgccagtggtaatacgattttttaagaaggcagtttgtcaattttaatcttgtggatacctttatactcttagggtattattttatacaaaagccttgaggattgcattctattttctatatgaccctcttgatatttaaaaaacactatggataacaattcttcatttacctagtattatgaaagaatgaaggagttcaaacaaatgtgtttcccagttaactagggtttactgtttgagccaatataaatgtttaactgtttgtgatggcagtattcctaaagtacattgcatgttttcctaaatacagagtttaaataatttcagtaattcttagatgattcagcttcatcattaagaatatcttttgttttatgttgagttagaaatgccttcatatagacatagtctttcagacctctactgtcagttttcatttctagctgctttcagggttttatgaattttcaggcaaagctttaatttatactaagcttaggaagtatggctaatgccaacggcagtttttttcttcttaattccacatgactgaggcatatatgatctctgggtaggtgagttgttgtgacaaccacaagcactttttttttttttaaagaaaaaaaggtagtgaatttttaatcatctggactttaagaaggattctggagtatacttaggcctgaaattatatatatttggcttggaaatgtgtttttcttcaattacatctacaagtaagtacagctgaaattcagaggacccataagagttcacatgaaaaaaatcaattcatttgaaaaggcaagatgcaggagagaggaagccttgcaaacctgcagactgctttttgcccaatatagattgggtaaggctgcaaaacataagcttaattagctcacatgctctgctctcacgtggcaccagtggatagtgtgagagaattaggctgtagaacaaatggccttctctttcagcattcacaccactacaaaatcatcttttatatcaacagaagaataagcataaactaagcaaaaggtcaataagtacctgaaaccaagattggctagagatatatcttaatgcaatccattttctgatggattgttacgagttggctatataatgtatgtatggtattttgatttgtgtaaaagttttaaaaatcaagctttaagtacatggacatttttaaataaaatatttaaagacaatttagaaaattgccttaatatcattgttggctaaatagaataggggacatgcatattaaggaaaaggtcatggagaaataatattggtatcaaacaaatacattgatttgtcatgatacacattgaatttgatccaatagtttaaggaataggtaggaaaatttggtttctatttttcgatttcctgtaaatcagtgacataaataattcttagcttattttatatttccttgtcttaaatactgagctcagtaagttgtgttaggggattatttctcagttgagactttcttatatgacattttactatgttttgacttcctgactattaaaaataaatagtagaaacaattttcataaagtgaagaattatataatcactgctttataactgactttattatatttatttcaaagttcatttaaaggctactattcatcctctgtgatggaatggtcaggaatttgttttctcatagtttaattccaacaacaatattagtcgtatccaaaataacctttaatgctaaactttactgatgtatatccaaagcttctccttttcagacagattaatccagaagcagtcataaacagaagaataggtggtatgttcctaatgatattatttctactaatggaataaactgtaatattagaaattatgctgctaattatatcagctctgaggtaatttctgaaatgttcagactcagtcggaacaaattggaaaatttaaatttttattcttagctataaagcaagaaagtaaacacattaatttcctcaacatttttaagccaattaaaaatataaaagatacacaccaatatcttcttcaggctctgacaggcctcctggaaacttccacatatttttcaactgcagtataaagtcagaaaataaagttaacataactttcactaacacacacatatgtagatttcacaaaatccacctataattggtcaaagtggttgagaatatattttttagtaattgcatgcaaaatttttctagcttccatcctttctccctcgtttcttctttttttgggggagctggtaactgatgaaatcttttcccaccttttctcttcaggaaatataagtggttttgtttggttaacgtgatacattctgtatgaatgaaacattggagggaaacatctactgaatttctgtaatttaaaatattttgctgctagttaactatgaacagatagaagaatcttacagatgctgctataaataagtagaaaatataaatttcatcactaaaatatgctattttaaaatctatttcctatattgtatttctaatcagatgtattactcttattatttctattgtatgtgttaatgattttatgtaaaaatgtaattgcttttcatgagtagtatgaataaaattgattagtttgtgttttcttgtctcccgaaaaaaaaaaaaaaaaaaaaaaaaaaaaaa

SEQ ID NO: 515 - DNA, 463 bp, Homo sapiens
tttttaattttttcccaagtttatttttctatttttttttcatggaaaaatggggtaacttagcagtttcaatattgaagactgaagtttaaaaaaaatttaaattcaaggtacttttaaaattcagttagaaaagtaggctttaaaaattattagagacaagagtaccaaagcggtgtgtgtatgtgtgtgtgtgtatgcatgcttgtggattggaaaaactttggagactgattacttttcattatatatgtgtcacagtgaaacagcttttatgtgtcatgtaagattactgcttgcctctctaaggaaggtcgtgactgtttaaatagacgggcaaggtggaacattttgaaagatgagcttttgaatataagttgtctgctagatcatggtttgtattgaactaacaaggtttgcagatctgctgacttatataaagctttttgattcctactaagct

SEQ ID NO: 516 - DNA, 3541 bp, Homo sapiens
  misc_feature (1282)..(1282): n is a, c, g, or t
  misc_feature (1522)..(1522): n is a, c, g, or t
  misc_feature (1840)..(1841): n is a, c, g, or t
  misc_feature (1845)..(1845): n is a, c, g, or t
  misc_feature (1851)..(1851): n is a, c, g, or t
  misc_feature (1855)..(1855): n is a, c, g, or t
  misc_feature (1864)..(1864): n is a, c, g, or t
  misc_feature (1903)..(1903): n is a, c, g, or t
  misc_feature (2109)..(2109): n is a, c, g, or t
  misc_feature (2218)..(2218): n is a, c, g, or t
  misc_feature (2476)..(2476): n is a, c, g, or t
  misc_feature (2488)..(2488): n is a, c, g, or t
  misc_feature (2574)..(2574): n is a, c, g, or t
  misc_feature (2734)..(2734): n is a, c, g, or t
  misc_feature (2753)..(2753): n is a, c, g, or t
  misc_feature (2774)..(2774): n is a, c, g, or t
  misc_feature (3259)..(3259): n is a, c, g, or t
  misc_feature (3381)..(3381): n is a, c, g, or t
  misc_feature (3398)..(3398): n is a, c, g, or t
cgcggccgcagccgcattgcccgctcggcgtccggcccccgacccgcgctcgtccgcccgcccgcccgcccgcccgcgccatgaacgccaaggtcgtggtcgtgctggtcctcgtgctgaccgcgctctgcctcagcgacgggaagcccgtcagcctgagctacagatgcccatgccgattcttcgaaagccatgttgccagagccaacgtcaagcatctcaaaattctcaacactccaaactgtgcccttcagattgtagcccggctgaagaacaacaacagacaagtgtgcattgacccgaagctaaagtggattcaggagtacctggagaaagctttaaacaagaggttcaagatgtgagagggtcagacgcctgaggaacccttacagtaggagtccagctctgaaaccagtgttagggaagggcctgccacagcctcccctgccagggcagggccccaggcattgccaagggctttgttttggacactttgccatattttcaccatttgattatgtagcaaaatacatgacatttatttttcatttagtttgattattcagtgtcactggcgacacgtagcagcttagactaaggccattattgtacttgccttattagagtgtctttccacggagccactcctctgactcagggctcctgggttttggattctctgagctgtgcaggtggggagactgggctgagggagcctggccccatggtcagccctagggtggagagccaccaagagggacgcctgggggtgtcaggaccagtcaacctgggcaaagcctagtgaaggcttctctctgtgggatgggatggtggagggccacatgggaggttcacccccttctccatccacatggtgagccgggtctgcctcttctgggagggcagcagggctaccctgagctgaggcagcagtgtgaggccagggcagagtgagacccagccctcatcccgagcacctccacatcctccacgttctgctcatcattctctgtctcatccatcatcatgtgtgtccacgactgtctccatggccccgcaaaaggactctcaggaccaaagctttcatgtaaactgtgcaccaagcaggaaatgaaaatgtcttgtgttacctgaaaacactgtgcacatctgtgtcttgtttggaatattgtccattgtccaatcctatgtttttggtcaaagccagcgtcctcctctgtgaccaatgtcttgatgcatgcactgttccccctgtgcagccgctgagcgaggagatgctccntgggccctttgagtgcagtcctgatcagagccgtggtcctttggggtgaactaccttggttcccccactgatcacaaaaacatggtgggtccatgggcagagcccaagggaattcggtgtgcaccagggttgaccccagaggattgctgccccatcagtgctccctcacatgtcagtaccttcaaactagggccaagcccagcactgcttgaggaaaacaagcattcacaacttgttttnggtttttaaaacccagtccacaaaataaccaatcctggacatgaagattctttcccaattcacatctaacctcatcttcttcaccatttggcaatgccatcatctcctgccttcctcctgggccctctctgctctgcgtgtcacctgtgcttcgggcccttcccacaggacatttctctaagagaacaatgtgctatgtgaagagtaagtcaacctgcctgacatttggagtgttccccttccactgagggcagtcgatagagctgtattaagccacttaaaatgtttgtcactttgccaaggcaagcacttgtgggnnttgnttgttntcantcagtcttncgaatactttttccccttgataaagactccagttaaaanaaattttaatgaagaaagtggaaacaaggaagtcaaagcaaggaaactatgtaacatgtaggaagtaggaagtaaattatagtgatgtaatcttgaattgtaactgttcttgaatttaataatctgtagggtaattagtaacatgtgttaagtattttcataagtatttcaaattggagcttcatggcagaaggcaaacccatcancaaaaattgtcccttaaacaaaaattaaaatcctcaatccagctatgttatattgaaaaaatagagcctgagggatctttactagttataaagatacagaactctttcnaaaccttttgaaattaacctctcactataccagtataattgagttttcagtggggcagtcattatccaggtaatccaagatattttaaaatctgtcacgtagaacttggatgtacctgcccccaatccatgaaccaagaccattgaattcttggttgaggaaacaaacatgaccctaaatcttgactacagtcaggaaaggaatcatttctatttctcctccatgggagaaaatagataagagtagaaactgcagggnaaaattatttgnataacaattcctctactaacaatcagctccttcctggagactgcccagctaaagcaatatgcatttaaatacagtcttccatttgnaagggaaaagtctcttgtaatccgaatctctttttggtttcgaactgctagtcaagtgcgtccacgagctgtttactagggatccctcatctgtccctccgggacctggtgctgcctctacctgacactcccttgggctccctgtaacctcttcagaggncctcgctgccagctctgtntcaggacccagaggaaggggncagaggctcgttgactggctgtgtgttgggattgagtctgtgccacgtgtttgtgctgtggtgtgtcccctctgtccaggcactgagataccagcgaggaggctccagagggcgctctgcttgttattagagattacctcctgagaaaaaaggttccgcttggagcagaggggctgaatagcagaaggttgcacctcccccaaccttagatgttctaagtctttccattggatctcattggacccttccatggtgtgatcgtctgactggtgttatcaccgtgggctccctgactgggagttgatcgcctttcccaggtgctacacccttttccagctggatgagaatttgagtgctctgatccctctacagagcttccctgactcattctgaaggagccccattcctgggaaatattccctagaaacttccaaatcccctaagcagaccactgataaaaccatgtagaaaatttgttattttgnaacctcgctggactctcagtctctgagcagtgaatgattcagtgttaaatgtgatgaatactgtattttgtattgtttcaattgcatctcccagataatgtgaaaatggtccaggagaaggncaattcctatacgcagngtgctttaaaaaataaataagaaacaactctttgagaaacaacaatttctactttgaagtcataccaatgaaaaaatgtatatgcacttataattttcctaataaagttctgtactcaaatgtaaaaaaaaaaaaaaaaaaaa

SEQ ID NO: 517 - DNA, 254 bp, Homo sapiens
ggtcctgtctctgctgtgctcacggagctgcgttgcacttgtttacgcgttacgctgagagtaaaccccaaaacgattggtaaactgcaggtgttccccgcaggcccgcagtgctccaaggtggaagtggtagcctccctgaagaacgggaagcaagtttgtctggacccggaagccccttttctaaagaaagtcatccagaaaattttggacagtggaaacaagaaaaactgagtaacagtcgacgcggccgc

SEQ ID NO: 518 - DNA, 2455 bp, Homo sapiens
gaattcgggcgggcttcttcgctgccgacgtacgacgagtggccgggctcttgcgtctggtaacgcgctgtctctaacgccagcgccgtctcgcgcgcactgcgcacagaccacccgcagacgcccggcagtccgcaggcccaaacgcgcacgcgaccccgctctccgcaccgtacccggccgcctcggcatggcgccccgcagcgcccggcgacccctgctgctgctactgcctgttgctgctgctcggcctcatgcattgtcgtcagcagccatgtttatggtgaaaaatggcaacgggaccgcgtgcataatggccaacttctctgctgccttctcagtgaactacgacaccaagagtggccccaagaacatgacctttgacctgccatcagatgccacagtggtgctcaaccgcagctcctgtggaaaagagaacacttctgaccccagtctcgtgattgcttttggaagaggacatacactcactctcaatttcacgagaaatgcaacacgttacagcgttcagctcatgagttttgtttataacttgtcagacacacaccttttccccaatgcgagctccaaagaaatcaagactgtggaatctataactgacatcagggcagatatagataaaaaatacagatgtgttagtggcacccaggtccacatgaacaacgtgaccgtaacgctccatgatgccaccatccaggcgtacctttccaacagcagcttcagcaggggagagacacgctgtgaacaagacaggccttccccaaccacagcgccccctgcgccacccagcccctcgccctcacccgtgcccaagagcccctctgtggacaagtacaacgtgagcggcaccaacgggacctgcctgctggccagcatggggctgcagctgaacctcacctatgagaggaaggacaacacgacggtgacaaggcttctcaacatcaaccccaacaagacctcggccagcgggagctgcggcgcccacctggtgactctggagctgcacagcgagggcaccaccgtcctgctcttccagttcgggatgaatgcaagttctagccggtttttcctacaaggaatccagttgaatacaattcttcctgacgccagagaccctgcctttaaagctgccaacggctccctgcgagcgctgcaggccacagtcggcaattcctacaagtgcaacgcggaggagcacgtccgtgtcacgaaggcgttttcagtcaatatattcaaagtgtgggtccaggctttcaaggtggaaggtggccagtttggctctgtggaggagtgtctgctggacgagaacagcacgctgatccccatcgctgtgggtggtgccctggcggggctggtcctcatcgtcctcatcgcctacctcgtcggcaggaagaggagtcacgcaggctaccagactatctagcctggtgcacgcaggcacagcagctgcaggggcctctgttcctttctctgggcttagggtcctgtcgaaggggaggcacactttctgcaaacgtttctcaaatctgcttcatccaatgtgaagttcatcttgcagcatttactatgcacaacagagtaactatcgaaatgacggtgttaattttgctaactgggttaaatattttgctaactggttaaacattaatatttaccaaagtaggattttgagggtgggggtgctctctctgagggggtgggggtgccgctgtctctgaggggtgggggtgccgctgtctgaggggtgggggtgccgctctctctgagggggtgggggtgccgctttctctgagggggtgggggtgccgctctctctgagggggtgggggtgctgctctctccgaggggtggaatgccgctgtctctgaggggtgggggtgccgctctaaattggctccatatcattgagtttagggttctggtgtttggtttcttcattctttactgcactcagatttaagccttacaaagggaaacctctggccgtcacacgtaggacgcatgaaggtcactcgtgtgaggctgacatgctcacacattacaacagtagagagggaaaatcctaagacagaggaactccagagatgagtgtctggagcggcttcagttcagctttaaaggccaggacgcgcgacacgtggctggcggcctcgttccagtggcggcacgtccttggcgtctctaatgtctgcagctcaagggctggcacttttttaaatataaaaatggtgttatttttatttttttttgtaaagtgatttttggtcttctgttgacattcgggtgatcctgttctgcgctgtgtacaatgtgagatcggtgcgttctcctgatgttttgccgtggcttggggattgtacacgggaccagctcacgtaatgcattgcctgtaacaatgtaataaaaagcctctttctttcaaaaaaaccccgaattc

SEQ ID NO: 519 - DNA, 409 bp, Homo sapiens
  misc_feature (217)..(217): n is a, c, g, or t
  misc_feature (219)..(219): n is a, c, g, or t
  misc_feature (223)..(223): n is a, c, g, or t
  misc_feature (308)..(308): n is a, c, g, or t
agtctagatgaatttattgccattcacatatttcatagaaaaaaagatgtagcaaacgggtcagggttgtacaaaaaaaaaaaaaaatccaggtttatataggttgctctatttacatctgagagcacagctgtcctggcatcaggcacagcagctgcacttgtctgacgtccctttgcagatgcagccctgggcacacttggcacagcccacaggnangcanggagcagcagctcttcttgcaggaggtgcatttgcactctttgcatttgcaggagccggcacaggcacaggagccaacaggcgangcaggagcagttggggtccatttcgaggcaaggagaagcaggagttcccgattcaagaggaaaacacgcagcgggacagattctcgtgccgaattcttggc

SEQ ID NO: 520 - DNA, 363 bp, Homo sapiens
tttccagaaaaggatattttttttattcaagtaactgcaaataggaaaccagagagggagccccaggctgggacaaatcatggctacccctccccaacagaacagggggaggaggtggcccctacaccctttatggtcgattcgggcccccttgctcactctgctgcagcatcctaggggcagggccagccttccctgggactggggtagtcggtcacccagcctgccatgccccagcccctcttccccacaaagagtatcttgggggaggggatcgtgggcagaacaggaggcaatgaggatgaacatttggcgctggtagcagcagcaatgacggattgtcgaagaatggaacattgaaca

SEQ ID NO: 521 - DNA, 2430 bp, Homo sapiens
catttcattggcgtttgagtcagcaaagaagtcaagatggccaaagttccagacatgtttgaagacctgaagaactgttacagtgaaaatgaagaagacagttcctccattgatcatctgtctctgaatcagaaatccttctatcatgtaagctatggcccactccatgaaggctgcatggatcaatctgtgtctctgagtatctctgaaacctctaaaacatccaagcttaccttcaaggagagcatggtggtagtagcaaccaacgggaaggttctgaagaagagacggttgagtttaagccaatccatcactgatgatgacctggaggccatcgccaatgactcagaggaagaaatcatcaagcctaggtcagcaccttttagcttcctgagcaatgtgaaatacaactttatgaggatcatcaaatacgaattcatcctgaatgacgccctcaatcaaagtataattcgagccaatgatcagtacctcacggctgctgcattacataatctggatgaagcagtgaaatttgacatgggtgcttataagtcatcaaaggatgatgctaaaattaccgtgattctaagaatctcaaaaactcaattgtatgtgactgcccaagatgaagaccaaccagtgctgctgaaggagatgcctgagatacccaaaaccatcacaggtagtgagaccaacctcctcttcttctgggaaactcacggcactaagaactatttcacatcagttgcccatccaaacttgtttattgccacaaagcaagactactgggtgtgcttggcaggggggccaccctctatcactgactttcagatactggaaaaccaggcgtaggtctggagtctcacttgtctcacttgtgcagtgttgacagttcatatgtaccatgtacatgaagaagctaaatcctttactgttagtcatttgctgagcatgtactgacccttgtaattctaaatgaatgtttacactctttgtaagagtggaaccaacactaacatataatgttgttatttaaagaacaccctatattttgcatagtaccaatcattttaattattattcttcataacaattttaggaggaccagagctactgactatggctaccaaaaagactctacccatattacagatgggcaaattaaggcataagaaaactaagaaatatgcacaatagcagttgaaacaagaagccacagacctaggatttcatgatttcatttcaactgtttgccttctacttttaagttgctgatgaactcttaatcaaatagcataagtttctgggacctcagttttatcattttcaaaatggagggaataatacctaagccttcctgccgcaacagttttttatgctaatcagggaggtcattttggtaaaatacttcttgaagccgagcctcaagatgaaggcaaagcacgaaatgttattttttaattattatttatatatgtatttataaatatatttaagataattataatatactatatttatgggaaccccttcatcctctgagtgtgaccaggcatcctccacaatagcagacagtgttttctgggataagtaagtttgatttcattaatacagggcattttggtccaagttgtgcttatcccatagccaggaaactctgcattctagtacttgggagacctgtaatcatataataaatgtacattaattaccttgagccagtaattggtccgatctttgactcttttgccattaaacttacctgggcattcttgtttcattcaattccacctgcaatcaagtcctacaagctaaaattagatgaactcaactttgacaaccatgagaccactgttatcaaagttgagttcatctaattttagcttgtagagacgggatttcaccatcttggccgtgctggtctcgaacttctgacctcgtgatccacccgcctcggcctcccaaagtgctgggattacaggcgtgagccatcgcgcccggcctggagtttctactgtgcaccaggcactacctttacatgtattgttttatttaatcctcagtcagccgtgtttggtaggtgcagttagtatatttccattttcatctgcgcaaacagattcaggaactttgtaatttacataaggtcacattcatcctaattcacaaaatcaagatttcacacctattcctttttctttccagtgcctgtgctttttctctcataccaaggagaagtaataagcctaacgttttaaacctcacaaaagtacatacagaaaagtaaatagcctaattttgcaactaatacaaatggcgctgtacttctttggtgatggtagatttataatttttgaagtatggtagattcaaatgaaccactgaaaaggcatttagtttcttgtcccaaataaaaaaaaaaaaaaaaaa

SEQ ID NO: 522 - DNA, 4639 bp, Homo sapiens
ggagagggagaaggctctcgggcggagagaggtcctgcccagctgttggcgaggagtttcctgtttcccccgcagcgctgagttgaagttgagtgagtcactcgcgcgcacggagcgacgacacccccgcgcgtgcacccgctcgggacaggagccggactcctgtgcagcttccctcggccgccgggggcctccccgcgcctcgccggcctccaggccccctcctggctggcgagcgggcgccacatctggcccgcacatctgcgctgccggcccggcgcggggtccggagagggcgcggcgcggaggcgcagccaggggtccgggaaggcgccgtccgctgcgctgggggctcggtctatgacgagcagcggggtctgccatgggtcgggggctgctcaggggcctgtggccgctgcacatcgtcctgtggacgcgtatcgccagcacgatcccaccgcacgttcagaagtcggttaataacgacatgatagtcactgacaacaacggtgcagtcaagtttccacaactgtgtaaattttgtgatgtgagattttccacctgtgacaaccagaaatcctgcatgagcaactgcagcatcacctccatctgtgagaagccacaggaagtctgtgtggctgtatggagaaagaatgacgagaacataacactagagacagtttgccatgaccccaagctcccctaccatgactttattctggaagatgctgcttctccaaagtgcattatgaaggaaaaaaaaaagcctggtgagactttcttcatgtgttcctgtagctctgatgagtgcaatgacaacatcatcttctcagaagaatataacaccagcaatcctgacttgttgctagtcatatttcaagtgacaggcatcagcctcctgccaccactgggagttgccatatctgtcatcatcatcttctactgctaccgcgttaaccggcagcagaagctgagttcaacctgggaaaccggcaagacgcggaagctcatggagttcagcgagcactgtgccatcatcctggaagatgaccgctctgacatcagctccacgtgtgccaacaacatcaaccacaacacagagctgctgcccattgagctggacaccctggtggggaaaggtcgctttgctgaggtctataaggccaagctgaagcagaacacttcagagcagtttgagacagtggcagtcaagatctttccctatgaggagtatgcctcttggaagacagagaaggacatcttctcagacatcaatctgaagcatgagaacatactccagttcctgacggctgaggagcggaagacggagttggggaaacaatactggctgatcaccgccttccacgccaagggcaacctacaggagtacctgacgcggcatgtcatcagctgggaggacctgcgcaagctgggcagctccctcgcccgggggattgctcacctccacagtgatcacactccatgtgggaggcccaagatgcccatcgtgcacagggacctcaagagctccaatatcctcgtgaagaacgacctaacctgctgcctgtgtgactttgggctttccctgcgtctggaccctactctgtctgtggatgacctggctaacagtgggcaggtgggaactgcaagatacatggctccagaagtcctagaatccaggatgaatttggagaatgttgagtccttcaagcagaccgatgtctactccatggctctggtgctctgggaaatgacatctcgctgtaatgcagtgggagaagtaaaagattatgagcctccatttggttccaaggtgcgggagcacccctgtgtcgaaagcatgaaggacaacgtgttgagagatcgagggcgaccagaaattcccagcttctggctcaaccaccagggcatccagatggtgtgtgagacgttgactgagtgctgggaccacgacccagaggcccgtctcacagcccagtgtgtggcagaacgcttcagtgagctggagcatctggacaggctctcggggaggagctgctcggaggagaagattcctgaagacggctccctaaacactaccaaatagctcttctggggcaggctgggccatgtccaaagaggctgcccctctcaccaaagaacagaggcagcaggaagctgcccctgaactgatgcttcctggaaaaccaagggggtcactcccctccctgtaagctgtggggataagcagaaacaacagcagcagggagtgggtgacatagagcattctatgcctttgacattgtcataggataagctgtgttagcacttcctcaggaaatgagattgatttttacaatagccaataacatttgcactttattaatgcctgtatataaatatgaatagctatgttttatatatatatatatatatctatatatgtctatagctctatatatatagccataccttgaaaagagacaaggaaaaacatcaaatattcccaggaaattggttttattggagaactccagaaccaagcagagaaggaagggacccatgacagcattagcatttgacaatcacacatgcagtggttctctgactgtaaaacagtgaactttgcatgaggaaagaggctccatgtctcacagccagctatgaccacattgcacttgcttttgcaaaataatcattccctgcctagcacttctcttctggccatggaactaagtacagtggcactgtttgaggaccagtgttcccggggttcctgtgtgcccttatttctcctggacttttcatttaagctccaagccccaaatctggggggctagtttagaaactctccctcaacctagtttagaaactctaccccatctttaataccttgaatgttttgaaccccactttttaccttcatgggttgcagaaaaatcagaacagatgtccccatccatgcgattgccccaccatctactaatgaaaaattgttctttttttcatctttcccctgcacttatgttactattctctgctcccagccttcatccttttctaaaaaggagcaaattctcactctaggctttatcgtgtttactttttcattacacttgacttgattttctagttttctatacaaacaccaatgggttccatctttctgggctcctgattgctcaagcacagtttggcctgatgaagaggatttcaactacacaatactatcattgtcaggactatgacctcaggcactctaaacatatgttttgtttggtcagcacagcgtttcaaaaagtgaagccactttataaatatttggagattttgcaggaaaatctggatccccaggtaaggatagcagatggttttcagttatctccagtccacgttcacaaaatgtgaaggtgtggagacacttacaaagctgcctcacttctcactgtaaacattagctctttccactgcctacctggaccccagtctaggaattaaatctgcacctaaccaaggtcccttgtaagaaatgtccattcaagcagtcattctctgggtatataatatgattttgactaccttatctggtgttaagatttgaagttggccttttattggactaaaggggaactcctttaagggtctcagttagcccaagtttcttttgcttatatgttaatagttttaccctctgcattggagagaggagtgctttactccaagaagctttcctcatggttaccgttctctccatcatgccagccttctcaacctttgcagaaattactagagaggatttgaatgtgggacacaaaggtcccatttgcagttagaaaatttgtgtccacaaggacaagaacaaagtatgagctttaaaactccataggaaacttgttaatcaacaaagaagtgttaatgctgcaagtaatctcttttttaaaactttttgaagctacttattttcagccaaataggaatattagagagggactggtagtgagaatatcagctctgtttggatggtggaaggtctcattttattgagatttttaagatacatgcaaaggtttggaaatagaacctctaggcaccctcctcagtgtgggtgggctgagagttaaagacagtgtggctgcagtagcatagaggcgcctagaaattccacttgcaccgtagggcatgctgataccatcccaatagctgttgcccattgacctctagtggtgagtttctagaatactggtccattcatgagatattcaagattcaagagtattctcacttctgggttatcagcataaactggaatgtagtgtcagaggatactgtggcttgttttgtttatgtttttttttcttattcaagaaaaaagaccaaggaataacattctgtagttcctaaaaatactgacttttttcactactatacataaagggaaagttttattcttttatggaacacttcagctgtactcatgtattaaaataggaatgtgaatgctatatactctttttatatcaaaagtctcaagcacttatttttattctatgcattgtttgtcttttacataaataaaatgtttattagattgaataaagcaaaatactcaggtgagcatcctgcctcctgttcccattcctagtagctaaaaaaaaaaaaa

SEQ ID NO: 523 - DNA, 2010 bp, Homo sapiens
attcattccctgtcctcggatcacagtctcttctcactacagtgtcgccgcctctgcctgcgtagccccggccatggctctgtagcctcgacccctttgtgcccccggcccgtctccgcgctcaccacgcctgcgctctccgctcccaccttctttcttcagccgaggccgccgccgcctctccttgctgcagccatggagtcttccactttcgccttggtgcctgtcttcgcccacctgagcatcctccagagcctcgtgccagctgctggtgcagcctctcctgttgccatcagtgcccagcacctgtgctacagccatgtcactcctggcgaccctggggctggagctggacagggccctgctcccagctagtgggctgggatggctcgtagactatgggaaactccccccggcccctgcccccctggctccctatgaggtccttgggggagccctggagggcgggcttccagtggggggagagcccctggcaggtgatggcttctctgactggatgactgagcgagttgatttcacagctctcctccctctggagcctcccctaccccccggcaccctcccccaaccttccccaaccccacctgacctggaagctatggcctccctcctcaagaaggagctggaacagatggaagacttcttcctagatgccccgcccctcccaccaccctccccgccgccactaccaccaccaccactaccaccagccccctccctccccctgtccctcccctcctttgacctcccccagccccctgtcttggatactctggacttgctggccatctactgccgcaacgaggccgggcaggaggaagtggggatgccgcctctgcccccgccacagcagccccctcctccttctccacctcaaccttctcgcctggccccctacccacatcctgccaccacccgaggggaccgcaagcaaaagaagagagaccagaacaagtcggcggctctgaggtaccgccagcggaagcgggcagagggtgaggccctggagggcgagtgccaggggctggaggcacggaatcgcgagctgaaggaacgggcagagtccgtggagcgcgagatccagtacgtcaaggacctgctcatcgaggtttacaaggcccggagccagaggacccgtagctgctagaagggcaggggtgtggcttctgggggctggtcttcagctctggcgccttcatccccctgcctctaccttcattccaaacccctctcggccgggtgcagtggcttatgcttgtaatcccagcactttgggaggccaaggcaggaggatcgtttgaggccaggaggtcaataccagcctgggcaacatagtaagaccctgtctctattaaaaaaaaaaaatcaacccttcttccccaccaaaccacccaactcctctctactcttatccttttatcctctgtctctgcttatcacctctcttgcgtatttctggatctccttccctcctttctcgtccaaatcatgaaatgtttggccttagtcaatgtctatgcccgtcacataacagccgaggcaccgaggcccacagggaagcagctgggagcttggaaacctggtctcttgaatttcaaacctggtttcttacaggtggttgtctggggtgggtggagtggcgacaggatagagctgaaggactatgcaaatgaggaagtaagtcagggcgggctttgagaaggggacccatatcctacaggcaaaaagcaggctaggtgaccttgggacactacgctaagggagggaggctaaaggcggccaggtttgcagtgcgggaagatgagcaggccagtgggaggaggggcagggcagggctgtagttggtgactgggtgttcattttagctctaagaaaaaaaatcagtgtttcgtgaaggtgttggagaggggctgtgtctgggtgagggatggcggggtactgatttttttgggaggttatgagcaaaaataaaacgaaacatttcctctg

SEQ ID NO: 524 - DNA, 3872 bp, Homo sapiens
cggacgaggcacgagtgaggggggaggcggtggcggcggccattttgagccgctgccgccattggagtgggccccccccctttcccccttcgcctcctgacaggaaaggtttaagggggacagagccctgggaggccgggccgggctcgggggccaccccgggggcccgggccatggatgtgcgccgtctgaaggtgaacgaacttcgcgaggagctgcagcgccgcggcctggacactcgaggcctcaaggccgagcttgctgagcggctgcaggcggcgttggaggccgaggagcctgacgacgagcgggagctcgacgccgacgacgaaccggggcgacccgggcacatcaacgaggaggtcgagaccgaggggggctccgagctggaggggaccgcgcagccaccgccgcccgggctgcagccgcacgcggagcccggcggctactcggggccggacggacattatgccatggacaatattaccaggcagaaccaattctacgatacccaagtcatcaaacaagaaaacgagtcaggctacgagaggagaccactggaaatggagcagcagcaggcctatcgtccagaaatgaagacagagatgaagcaaggagcacccaccagcttcctcccgcctgaagcttctcaactcaagccagacaggcagcaattccagagtcgaaagaggccttatgaagaaaaccggggacgggggtactttgagcaccgagaggataggaggggccgctctcctcagcctcctgctgaagaggatgaagatgactttgatgatacccttgttgctattgacacctataactgcgacctccacttcaaggtggcccgagatcggagtagtggctatccgctcacaattgagggctttgcatacctgtggtcaggagcccgtgccagctatggggtcagaaggggccgtgtatgcttcgagatgaagatcaatgaggaaatctccgtgaagcaccttccgtctacagagcctgacccccacgtggtccgtatcggctggtccctggactcctgcagcacccagctaggcgaagagcctttctcctatggctatggaggcactgggaagaagtccaccaatagccggtttgaaaactacggagacaagtttgcagagaacgatgtgattggctgctttgcggattttgaatgtggaaatgacgtggaactgtcttttaccaagaatggaaagtggatgggcattgctttccgaatccagaaggaagccttggggggtcaggccctctatcctcatgtcctggtgaagaattgcgcagtggagttcaacttcggacagagagcagagccctactgttctgtcctcccggggtttaccttcatccagcaccttccccttagtgagcgtatccggggcaccgttggaccaaagagcaaggcagaatgtgagattctgatgatggtgggcctgcctgctgctggcaagaccacatgggccatcaaacatgcagcctccaacccttccaagaagtacaacatcctgggtaccaatgccatcatggataagatgcgggtgatgggcctacgccggcagcggaactatgctggccgctgggatgtcctgatccagcaggccacccagtgcctcaaccgcctcatccagattgctgcccgcaagaaacgcaactatatcctagatcagacaaatgtttatgggtcagcccagagacgaaaaatgagaccatttgaaggcttccagcgcaaagctattgtaatttgtcccactgacgaggacctaaaagaccgaacaataaagcgaaccgacgaggaagggaaggatgtcccagatcatgcggtcttagaaatgaaagccaacttcacgttgccagatgttggggacttcctggatgaggttctgttcattgagctgcagcgggaggaagcggacaagctagtgaggcagtacaacgaggaaggccgcaaggctgggccaccccctgaaaagcgctttgacaaccgaggtggtggtggcttccggggccgcgggggtggtggtggcttccagcgctatgaaaaccgaggaccccctggaggcaaccgtggcggcttccagaaccgagggggaggcagcggtggaggaggcaactaccgaggaggtttcaaccgcagcggaggtggtggctatagccagaaccgctggggtaacaacaaccgggataacaacaactccaacaacagaggcagctacaaccgggctccccagcaacagccgccaccacagcagcctccgccaccacagccaccaccccagcagccaccgccaccacccagctacagccctgctcggaaccccccaggggccagcacctacaataagaacagcaacatccctggctcaagcgccaataccagcacccccaccgtcagcagctacagccctccacagccgagttacagccagccaccctacaaccagggaggttacagccagggctacacagccccaccgcctccacctccaccaccacctgcctacaactatgggagctacggcggttacaacccggccccctataccccaccgccaccccccactgcacagacctaccctcagcccagctataaccagtatcagcagtatgcccagcagtggaaccagtactatcagaaccagggccagtggccgccatactacgggaactacgactacgggagctactccgggaacacacagggtggcacaagtacacagtagccagtgtgacccagaggctcccggaggcccctgccggcttcctccaccagcgcctgcctcggcccctcctctgcccccgccagatcccgtggtgctggggatggggtcatcccagggctgcctccctccagcccactgcctcccctctgaggggcttccttcccctccatagggccaggcatttttttctggattcaaacaggcaacaatgaccttttattttctgtttgtccccacctccccagccttccacctcctgttcttcctaccttcttcctttttgactaaataatccccacctcccttgatcatacagtgaggctacagtgactgaggggagaatcccctcctgttcactctcccaaccctgctccagcccctcagcttcccagaccctcatgcagttggttgtaaattctcccaggagctgttttactgtctacttttcaggattaaaaaaaaaatcaaaacttaaaaaaaaaaaagtttaaaaagcaaaatggggagggggaggaagcagtgacttttttttggtaattatgcgcttttttttaatttttagaatttgtctttttactgtgggtgggctgttgatatttcatcaagataagcatttctttcctgagttcaggtgactgaggaagagccacaaaacaaaacacaacaaaaccaaaccacagaatcatctttaacccaactttttatacgatgccccagttccccataactttgcacacaagcttctgtgttcagttgaattgtaactgctttttgtatttggagagagtgactattgaacttgaaaccttttattccgggcgtcttggtagtttctggtgggattcagtgggtgagagggaagaaggggaggttggggggctccttcccttcagaacttgaagtttctcccactgcctcctctccagtggtctcccaggtgccagacccaaaagcttttcctacagtgataccctttatttttacttccccttgactcatatgttttaacatgattttaacaaactgcacttattaagaaatgtgtttgccctgttttgtttggtttcgttttgttttctttgaataaatgacatggcacctcctagcaggaaggaagcagggttgaaa

SEQ ID NO: 525 - DNA, 5179 bp, Homo sapiens
acctctactggggagacgaggaccccgaggttctggggggcgacgcgacctgcccgaagtgacaagggtcctgggccgcactgctccgccggggtctgcgctcctcggcggagcgggtgggaaggatgagtcctcggggtggagaaggaggagcgggtccccgggtaccgctcacccggccttaggagcccgggagcgcgcgtagggacgcggagttgaggctctccatctgcggccagggaaagggatacagtcccccgggcccctcccggccgctcggaacccaccccaggcgcgtccccgcgggcgcgcgctccaggcggggccgacgggctcggaggcgcgcgcccgctgccgggtccgccgcgcgcgctccctccgctcctctcccccgcccctcccgggcccgcgcgctcccagggtccgccgcgcgcgcgcctcgcgtcgctccccatccccgcccctcccgccgccaccccgcccccggccgggtaccctcgccggacccgagagagagcgccgccgccatcttagttgctgccgctgccttcagcaagacgctgctctgaggcggggagggcgccgcgtcctgagcgcgcggcccagcgtcacggcggcggcggcggcggctcctccttggacccccggagctccccgcgccgcggagcagctggccccaggcccctagagccccgagagctccgagagctccgctcggcgtcccgcgcgcctccctgccgctcccgccccgggctggcgatgctgcgccgccccgctcccgcgctggccccggccgcccggctgctgctggccgggctgctgtgcggcggcggggtctgggccgcgcgagttaacaagcacaagccctggctggagcccacctaccacggcatagtcacagagaacgacaacaccgtgctcctcgaccccccactgatcgcgctggataaagatgcgcctctgcgatttgcaggtgagatttgtggatttaaaattcacgggcagaatgtcccctttgatgcagtggtagtggataaatccactggtgagggagtcattcgctccaaagagaaactggactgtgagctgcagaaagactattcattcaccatccaggcctatgattgtgggaagggacctgatggcaccaacgtgaaaaagtctcataaagcaactgttcatattcaggtgaacgacgtgaatgagtacgcgcccgtgttcaaggagaagtcctacaaagccacggtcatcgaggggaagcagtacgacagcattttgagggtggaggccgtggatgccgactgctcccctcagttcagccagatttgcagctacgaaatcatcactccagacgtgccctttactgttgacaaagatggttatataaaaaacacagagaaattaaactacgggaaagaacatcaatataagctgaccgtcactgcctatgactgtgggaagaaaagagccacagaagatgttttggtgaagatcagcattaagcccacctgcacccctgggtggcaaggatggaacaacaggattgagtatgagccgggcaccggcgcgttggccgtctttccaaatatccacctggagacatgtgacgagccagtcgcctcagtacaggccacagtggagctagaaaccagccacatagggaaaggctgcgaccgagacacctactcagagaagtccctccaccggctctgtggtgcggccgcgggcactgccgagctgctgccatccccgagtggatccctcaactggaccatgggcctgcccaccgacaatggccacgacagcgaccaggtgtttgagttcaacggcacccaggcagtgaggatcccggatggcgtcgtgtcggtcagccccaaagagccgttcaccatctcggtgtggatgagacatgggccattcggcaggaagaaggagacaattctttgcagttctgataaaacagatatgaatcggcaccactactccctctatgtccacgggtgccggctgatcttcctcttccgtcaggatccttctgaggagaagaaatacagacctgcagagttccactggaagttgaatcaggtctgtgatgaggaatggcaccactacgtcctcaatgtagaattcccgagtgtgactctctatgtggatggcacgtcccacgagcccttctctgtgactgaggattacccgctccatccatccaagatagaaactcagctcgtggtgggggcttgctggcaagagttttcaggagttgaaaatgacaatgaaactgagcctgtgactgtggcctctgcaggtggcgacctgcacatgacccagtttttccgaggcaatctggctggcttaactctccgttccgggaaactcgcggataagaaggtgatcgactgtctgtatacctgcaaggaggggctggacctgcaggtcctcgaagacagtggcagaggcgtgcagatccaagcacaccccagccagttggtattgaccttggagggagaagacctcggggaattggataaggccatgcagcacatctcgtacctgaactcccggcagttccccacgcccggaattcgcagactcaaaatcaccagcacaatcaagtgttttaacgaggccacctgcatttcggtccccccggtagatggctacgtgatggttttacagcccgaggagcccaagatcagcctgagtggcgtccaccattttgcccgagcagcttctgaatttgaaagctcagaaggggtgttccttttccctgagcttcgcatcatcagcaccatcacgagagaagtggagcctgaaggggacggggctgaggaccccacagttcaagaatcactggtgtccgaggagatcgtgcacgacctggatacctgtgaggtcacggtggagggagaggagctgaaccacgagcaggagagcctggaggtggacatggcccgcctgcagcagaagggcattgaagtgagcagctctgaactgggcatgaccttcacaggcgtggacaccatggccagctacgaggaggttttgcacctgctgcgctatcggaactggcatgccaggtccttgcttgaccggaagtttaagctcatctgctcagagctgaatggccgctacatcagcaacgaatttaaggtggaggtgaatgtaatccacacggccaaccccatggaacacgccaaccacatggctgcccagccacagttcgtgcacccggaacaccgctcctttgttgacctgtcaggccacaacctggccaacccccacccgttcgcagtcgtccccagcactgcgacagttgtgatcgtggtgtgcgtcagcttcctggtgttcatgattatcctgggggtatttcggatccgggccgcacatcggcggaccatgcgggatcaggacaccgggaaggagaacgagatggactgggacgactctgccctgaccatcaccgtcaaccccatggagacctatgaggaccagcacagcagtgaggaggaggaggaagaggaagaggaagaggaaagcgaggacggcgaagaagaggatgacatcaccagcgccgagtcggagagcagcgaggaggaggagggggagcagggcgacccccagaacgcaacccggcagcagcagctggagtgggatgactccaccctcagctactgacccgtgcccccggccacctcggtttctgctttcgaagactctgctgccatccgttctcccagtcccaagggtccacgatgtacaaagtcatttcggccagtaggtgtgcagacccctccccgccacgatcgtcgctgtgcttggtgtgtaggaccctaggctccccgcccaccctctgcctggtcgcgctcttcagtcccacgaggagctgacacgtcctctctggccgccatccggctcgcacaggggcctcccagcgcctcaggccccgcgtttgtgtctggagtctccccccggggagaggacactggcccctcgcactccagaaaagccatgccagctgggctcgttgacaaagggtaaaacatgctcactcccacccggtaatcatttttttctttttttaaaaaaagtttttattttttccaaactagtgcatgtataaataatggcaggatggggggtactgtgtagatgattaactgactttttaatattttgtaaataaatcggattccttgtgtcctttgtgctagtgtaacccgggactggaatgtaaagtgaagttcggagctctgagcacgggctcttcccgccgggtcctccctccccagaccccagagggagaggcccaccccgcccagccccgccccagcccctgctcaggtctgagtatggctgggagtcgggggccacaggcctctagctgtgctgctcaagagactggatcagggtagctacaagtggccgggccttgcctttgggattctacctgttcctaatttggtgtggggtgcggggtccctggccccttttccacactcctcctccgacagcagctccctgggcagtggcctggtctcaccgtgtgcagccttgtggtttatgcttaaatgtacattttcctgctggtaaaaggagaaactgagaggtgtcctgcagaccggctgaccactccttttggagacggcaggaggcctgagcgatccgtactcagaacgtccaggagagacgcatggcccgaagtcaaagtgctggaattttccaaaacagcctgttctctcctctctcctccccagagcaccccctgccatcaggggggttgaaatccctctcccccaggagccctgctgctttgcttggtggtagggcaggagagcaaacaaacagtcatggtctaaaacccacatagcactttgctcttagttacatgtaaaattttagatttctaaaacaggtgggcaatcattttgaatactgttctgtgaccctgactgctagttctgaggacactggtggctgtgctatgtgtggccatcctccatgtcccgtccctgtagctgctctgtttagacagcggacagacgctcacgcccaggggatgtcctcacgctgtcgccgcgcggtttcccttcgcagatgtgtatactcatgataggtcagaaagtgtatccgctacaataaagttctggttctaactaactccaaaaaaaaaaaaaaaaaa

SEQ ID NO: 526 - DNA, 256 bp, Homo sapiens
ggaggatatgaagtccatcttcacttcagagatctcctccgtcttgatatttgtcaacccagaacctggtcgagtggtcagtttcctcggcagcggtaggcgagagcacgcggaggagcgtgcgcgggggccccgggagacggcggcggtggcggcgcgggcagagcaaggacgcggcggatcccactcgcacagcagcgcactcggtgccccgcgcagggtcgcgatgctgcccggtttggcactgctcctgctg

SEQ ID NO: 527 - DNA, 1932 bp, Homo sapiens
tatcatgcatgtgggaaggtgggtgtggtgagaaaagttttaaggcaagagtagatggccatgttcaactttacaaaatttcttggaaaactggcagtattttgaactgcatcttctttggtaccggaacctgcagaaacagtgtgagaaattaagtcctggttcactgcgcagtagcaaagatggtcaaggccatggaaaaagcagaaatttaccaagaaagctgatacccatgtatagttcccactcatctcaaatacatctgctatctttttaagctaagtcctagacatatcggggataacatgggggttgattagtgaccacagttatcagaagcagagaaatgtaattccatattttatttgaaacttattccatattttaattggatattgagtgattgggttatcaaacacccacaaactttaattttgttaaatttatatggctttgaaatagaagtataagttgctaccattttttgataacattgaaagatagtattttaccatctttaatcatcttggaaaatacaagtcctgtgaacaaccactctttcacctagcagcatgaggccaaaagtaaaggctttaaattataacatatgggattcttagtagtatgtttttttcttgaaactcagtggctctatctaaccttactatctcctcactctttctctaagactaaactctaggctcttaaaaatctgcccacaccaatcttagaagctctgaaaagaatttgtctttaaatatcttttaatagtaacatgtattttatggaccaaattgacattttcgactattttttccaaaaaagtcaggtgaatttcagcacactgagttgggaatttcttatcccagaagaccaaccaatttcatatttatttaagattgattccatactccgttttcaaggagaatccctgcagtctccttaaaggtagaacaaatactttctattttttttttcaccattgtgggattggactttaagaggtgactctaaaaaaacagagaacaaatatgtctcagttgtattaagcacggacccatattatcatattcacttaaaaaaatgatttcctgtgcaccttttggcaacttctcttttcaatgtagggaaaaacttagtcaccctgaaaacccacaaaataaataaaacttgtagatgtgggcagaaggtttgggggtggacattgtatgtgtttaaattaaaccctgtatcactgagaagctgttgtatgggtcagagaaaatgaatgcttagaagctgttcacatcttcaagagcagaagcaaaccacatgtctcagctatattattatttattttttatgcataaagtgaatcatttcttctgtattaatttccaaagggttttaccctctatttaaatgctttgaaaaacagtgcattgacaatgggttgatatttttctttaaaagaaaaatataattatgaaagccaagataatctgaagcctgttttattttaaaactttttatgttctgtggttgatgttgtttgtttgtttgtttctattttgttggttttttactttgttttttgttttgttttgttttgttttgcatactacatgcagttctttaaccaatgtctgtttggctaatgtaattaaagttgttaatttatatgagtgcatttcaactatgtcaatggtttcttaatatttattgtgtagaagtactggtaatttttttatttacaatatgtttaaagagataacagtttgatatgttttcatgtgtttatagcagaagttatttatttctatggcattccagcggatattttggtgtttgcgaggcatgcagtcaatattttgtacagttagtggacagtattcagcaacgcctgatagcttctttggccttatgttaaataaaaagacctgtttgggatgt

SEQ ID NO: 528 - DNA, 1666 bp, Homo sapiens
gatccctccgctctggggaggcagcgctggcggcggggctggggccactgaggaaatccatccgcgccgccgccgccgccgccgccgccgccgccgcctccgccgcggaggaagacagcgccgcccgcgcaccgccagcgacccccgccgcagagtcccaccgccacaggcctcgggccagcggccaggagctgcctcccccagcccccgtcccgcggcccccagccgcccccaaccctgccccacgggcccggcgccatgagtgagctggagcaactgagacaggaggccgagcagctccggaaccagatccgggatgcccgaaaagcatgtggggactcaacactgacccagatcacagctgggctggacccagtggggagaatccagatgaggacccggaggaccctccgtgggcacctggcaaagatctatgccatgcactgggggaccgactcaaggctgctggtcagcgcctcccaggatgggaagctcatcatctgggacagctacaccaccaacaaggtccacgccatcccgctgcgctcctcctgggtaatgacctgtgcctacgcgccctcagggaactttgtggcctgtggggggttggacaacatctgctccatctacagcctcaagacccgcgagggcaacgtcagggtcagccgggagctgcctggccacactgggtacctgtcgtgttgccgcttcctggatgacaaccaaatcatcaccagctctggggataccacctgtgccctgtgggacattgagacaggccagcagacagtgggttttgctggacacagtggggatgtgatgtccctgtccctggcccccgatggccgcacgtttgtgtcaggcgcctgtgatgcctctatcaagctgtgggacgtgcgggattccatgtgccgacagaccttcatcggccatgaatccgacatcaatgcagtggctttcttccccaacggctacgccttcaccaccggctctgacgacgccacgtgccgcctcttcgacctgcgggccgatcaggagctcctcatgtactcccatgacaacatcatctgtggcatcacctctgttgccttctcgcgcagcggacggctgctgctcgctggctacgacgacttcaactgcaacatctgggatgccatgaagggcgaccgtgcaggagtcctcgctggccacgacaaccgcgtgagctgcctcggggtcaccgacgatggcatggctgtggccacgggctcctgggactccttcctcaagatctggaactaatggccccacccccactgggcccaggccaggaggggccctgcccatgcccacactacaggccagggctgcggggctggcgcaatcccagcccccttccccgggccacggggccttgggtccctgccctcccacccaggtttggttcctcccggggcccccactgtggagataagaaggggatggaatgggggaagaggaggagcaggaggccctcatccttctgctgccctggggttggggcctcacccctctggagggccggaggcaggaggtggaaaccccaggggctggcttttttaaaactggttttattttaatttttattatattttcagtttttccataaaggagccaattccaactctgtaaaaaaaaaaaaaaaaaa

SEQ ID NO: 529 - DNA, 3264 bp, Homo sapiens
ggtttgggcctggctctgtgactgaggcggcggcggtggcggccaagcgggatacgggcggcgggagctggggaacaggcatggacgtttccgggcaagagaccgactggcggagcaccgccttccggcagaagctggtcagtcaaatcgaggatgccatgaggaaagctggtgtggcacacagtaaatccagcaaggatatggagagccatgttttcctgaaggccaagacccgggacgaatacctttctctcgtggccaggctcattatccattttcgagacattcataacaagaaatctcaagcttccgtcagtgatcctatgaatgcactccagagcctgactggcggacctgctgcgggagccgctggaattggcatgcctcctcggggcccgggacagtctctgggcgggatgggtagccttggtgccatgggacagccaatgtctctctcagggcagccgcctcctgggacctcggggatggcccctcacagcatggctgtcgtgtctacggcaactccacagacccagctgcagctccagcaggtggcgctgcagcagcagcagcaacagcagcagttccagcagcagcagcaggcggcgctacagcagcagcagcagcagcagcaacagcagcagttccaggctcagcagagtgccatgcagcagcagttccaagcagtagtgcagcagcagcagcagctccagcagcagcagcagcagcagcagcatctaattaaattgcatcatcaaaatcagcaacagatacagcagcagcaacagcagctgcagcgaatagcacagctgcagctccaacaacagcaacagcagcagcagcagcagcagcagcagcagcagcaggctttgcaggcccagccaccaattcagcagccaccgatgcagcagccacagcctccgccctcccaggctctgccccagcagctgcagcagatgcatcacacacagcaccaccagccgccaccacagccccagcagcctccagttgctcagaaccaaccatcacaactcccgccacagtcgcagacccagcctttggtgtcacaggcgcaagctctccctggacaaatgttgtatacccaaccaccactgaaatttgtccgagctccgatggtggtgcagcagcccccagtgcagccccaggtgcagcagcagcagacagcagtacagacagctcaggctgcccagatggtggctcccggagtccaggtcagccagagcagcctccccatgctgtcctcgccgtcaccgggccagcaggtgcagaccccgcagtcgatgccccctcccccccagccgtccccgcagcccggccagcccagctcacagcccaactccaacgtcagctctggccctgccccatctcccagtagcttcctgcccagcccctcaccgcagccctcccagagcccagtgacggcgcggaccccacagaacttcagtgtcccctcacctggacctttaaacacacctgtgaaccccagctctgtcatgagcccagctggctccagccaggctgaggagcagcagtacctggacaagctgaagcagctgtcgaagtacatcgagcccctgcgccgcatgatcaacaagatcgacaagaacgaagacagaaaaaaggacctgagtaagatgaagagccttctggacattctgacagacccctcgaagcggtgtcccctgaagaccttgcaaaagtgtgagatcgccctggagaaactcaagaatgacatggcggtgcccactcccccaccgcccccggtgccaccgaccaaacagcagtacctatgccagccgctcctggatgccgtcctggccaacatccgctcacctgtcttcaaccattccctgtaccgcacattcgttccagccatgaccgccattcacggcccacccatcacggccccagtggtgtgcacccggaagcgcaggcttgaggatgatgagcggcagagcatccccagtgtgctccagggtgaggtggccaggctggaccccaagttcctggtaaacctggacccttctcactgcagcaacaatggcactgtccacctgatctgcaagctggatgacaaggacctcccaagtgtgccaccactggagctcagtgtgcccgctgactatcctgcccaaagcccgctgtggatagaccggcagtggcagtacgacgccaaccccttcctccagtcggtgcaccgctgcatgacctccaggctgctgcagctcccggacaagcactcggtcaccgccttgctcaacacctgggcccagagcgtccaccaggcctgcctctcagccgcctagccaagactgcagggatggcccgcagcctcatcggggccaaggacacacgcctcctgtcagacacttctaggtgttggcttccttagagagcctggggttaggttagctttcctgcttttatcttctgccttggggacctgccaaacgaaatcccacacctgtacagaactgggataggcgcagtggagcgggttgcttggggggcgttggccgacttcttagagaaggccctccatgtgacttcctcccaggagccagatgcgatcctcaggctgctctcaccgtggcctgtccacggtccaggtccatctcagcagcgtgagggtgcactcagggtgttgttagagcgtctcgtgtgtgctagacgcacccctactcgttcctatagaacacagaggacataggaaacccttaaaacacacatgggattctctggtcacagttttgggttcaggctatgctgctttgggcaggtggagcaccccccgaggaagcctgcaagtccagggcacaggctgccttttggagggagggctggcccataggtgctgctggctccccgccaccagctgggcctcagccctcacggcattcctgctgagcaccgtggggcacccagggagcaggggcgtcagggatcctgctgccggcacccctgtgccgctggcatgagggccgtgtccccactgtgaaggatgaagagcaaggccctcaggacccgtgtcctcagagcaccacacactgagcacccagagacagcgggcctggcagcgggccgggccatgcagggagcgcctccctatgttgcctgccactctgggcaccggccagcaccctctggtgagaagaggtcccccctttttatgtgcactaccccaccatctgtgattataataaatttattattcctgtgtttgtcagttgttcaaaaaaaaaa

SEQ ID NO: 530 - DNA, 5045 bp, Homo sapiens
tctagatgggggtcctgggccccagggtgtgcagccactgacttggggactgctggtggggtagggatgagggagggaggggcattgtgatgtacagggctgctctgtgagatcaagggtctcttaagggtgggagctggggcagggactacgagagcagccagatgggctgaaagtggaactcaaggggtttctggcacctacctacctgcttcccgctggggggtggggagttggcccagagtcttaagattggggcagggtggagaggtgggctcttcctgcttcccactcatcttatagctttctttccccagatccgaattcgagatccaaaccaaggaggaaaggatatcacagaggagatcatgtctggggcccgcactgcctccacacccacccctccccagacgggaggcggtctggagcctcaagctaatggggagacgccccaggttgctgtcattgtccggccagatgaccggtcacagggagcaatcattgctgaccggccagggctgcctggcccagagcatagcccttcagaatcccagccttcgtcgccttctccgaccccatcaccatccccagtcttggaaccggggtctgagcctaatctcgcagtcctctctattcctggggacactatgacaactatacaaatgtctgtagaagaatcaacccccatctcccgtgaaactggggagccatatcgcctctctccagaacccactcctctcgccgaacccatactggaagtagaagtgacacttagcaaaccggttccagaatctgagttttcttccagtcctctccaggctcccacccctttggcatctcacacagtggaaattcatgagcctaatggcatggtcccatctgaagatctggaaccagaggtggagtcaagcccagagcttgctcctcccccagcttgcccctccgaatcccctgtgcccattgctccaactgcccaacctgaggaactgctcaacggagccccctcgccaccagctgtggacttaagcccagtcagtgagccagaggagcaggccaaggaggtgacagcatcaatggcgccccccaccatcccctctgctactccagctacggctccttcagctacttccccagctcaggaggaggaaatggaagaagaagaagaagaggaagaaggagaagcaggagaagcaggagaagctgagagtgagaaaggaggagaggaactgctccccccagagagtacccctattccagccaacttgtctcagaatttggaggcagcagcagccactcaagtggcagtatctgtgccaaagaggagacggaaaattaaggagctaaataagaaggaggctgttggagaccttctggatgccttcaaggaggcgaacccggcagtaccagaggtggaaaatcagcctcctgcaggcagcaatccaggcccagagtctgagggcagtggtgtgcccccacgtcctgaggaagcagatgagacctgggactcaaaggaagacaaaattcacaatgctgagaacatccagcccggggaacagaagtatgaatataagtcagatcagtggaagcctctaaacctagaggagaaaaaacgttacgaccgtgagttcctgcttggttttcagttcatctttgccagtatgcagaagccagagggattgccacatatcagtgacgtggtgctggacaaggccaataaaacaccactgcggccactggatcccactagactacaaggcataaattgtggcccagacttcactccatcctttgccaaccttggccggacaacccttagcacccgtgggcccccaaggggtgggccaggtggggagctgccccgtgggccggctggcctgggaccccggcgctctcagcagggaccccgaaaagaaccacgcaagatcattgccacagtgttaatgaccgaagatataaaactgaacaaagcagagaaagcctggaaacccagcagcaagcggacggcggctgataaggatcgaggggaagaagatgctgatggcagcaaaacccaggacctattccgcagggtgcgctccatcctgaataaactgacaccccagatgttccagcagctgatgaagcaagtgacgcagctggccatcgacaccgaggaacgcctcaaaggggtcattgacctcatttttgagaaggccatttcagagcccaacttctctgtggcctatgccaacatgtgccgctgcctcatggcgctgaaagtgcccactacggaaaagccaacagtgactgtgaacttccgaaagctgttgttgaatcgatgtcagaaggagtttgagaaagacaaagatgatgatgaggtttttgagaagaagcaaaaagagatggatgaagctgctacggcagaggaacgaggacgcctgaaggaagagctggaagaggctcgggacatagcccggcggcgctctttagggaatatcaagtttattggagagttgttcaaactgaagatgttaacagaggcaataatgcatgactgtgtggtcaaactgcttaagaaccatgatgaagagtcccttgagtgcctttgtcgtctgctcaccaccattggcaaagacctggactttgaaaaagccaagccccgaatggatcagtatttcaaccagatggaaaaaatcattaaagaaaagaagacgtcatcccgcatccgctttatgctgcaggacgtgctggatctgcgagggagcaattgggtgccacgccgaggggatcagggtcccaagaccattgaccagatccataaggaggctgagatggaagaacatcgagagcacatcaaagtgcagcagctcatggccaagggcagtgacaagcgtcggggcggtcctccaggccctcccatcagccgtggacttccccttgtggatgatggtggctggaacacagttcccatcagcaaaggtagccgccccattgacacctcacgactcaccaagatcaccaagcctggctccatcgattctaacaaccagctctttgcacctggagggcgactgagctggggcaagggcagcagcggaggctcaggagccaagccctcagacgcagcatcagaagctgctcgcccagctactagtactttgaatcgcttctcagcccttcaacaagcggtacccacagaaagcacagataatagacgtgtggtgcagaggagtagcttgagccgagaacgaggcgagaaagctggagaccgaggagaccgcctagagcggagtgaacggggaggggaccgtggggaccggcttgatcgtgcgcggacacctgctaccaagcggagcttcagcaaggaagtggaggagcggagtagagaacggccctcccagcctgaggggctgcgcaaggcagctagcctcacggaggatcgggaccgtgggcgggatgccgtgaagcgagaagctgccctacccccagtgagccccctgaaggcggctctctctgaggaggagttagagaagaaatccaaggctatcattgaggaatatctccatctcaatgacatgaaagaggcagtccagtgcgtgcaggagctggcctcaccctccttgctcttcatctttgtacggcatggtgtcgagtctacgctggagcgcagtgccattgctcgtgagcatatggggcagctgctgcaccagctgctctgtgctgggcatctgtctactgctcagtactaccaagggttgtatgaaatcttggaattggctgaggacatggaaattgacatcccccacgtgtggctctacctagcggaactggtaacacccattctgcaggaaggtggggtgcccatgggggagctgttcagggagattacaaagcctctgagaccgttgggcaaagctgcttccctgttgctggagatcctgggcctcctgtgcaaaagcatgggtcctaaaaaggtggggacgctgtggcgagaagccgggcttagctggaaggaatttctacctgaaggccaggacattggtgcattcgtcgctgaacagaaggtggagtataccctgggagaggagtcggaagcccctggccagagggcactcccctccgaggagctgaacaggcagctggagaagctgctgaaggagggcagcagtaaccagcgggtgttcgactggatagaggccaacctgagtgagcagcagatagtatccaacacgttagttcgagccctcatgacggctgtctgctattctgcaattatttttgagactcccctccgagtggacgttgcagtgctgaaagcgcgagcgaagctgctgcagaaatacctgtgtgacgagcagaaggagctacaggcgctctacgccctccaggcccttgtagtgaccttagaacagcctcccaacctgctgcggatgttctttgacgcactgtatgacgaggacgtggtgaaggaggatgccttctacagttgggagagtagcaaggaccccgctgagcagcagggcaagggtgtggcccttaaatctgtcacagccttcttcaagtggctccgtgaagcagaggaggagtctgaccacaactgagggctggtggggccggggacctggagccccatggacacacagatggcccggctagccgcctggactgcaggggggcggcagcagcggcggtggcagtgggtgcctgtagtgtgatgtgtctgaactaataaagtggctgaagaggcaggatggcttggggctgcctgggcccccctccaggatgccgccaggtgtccctctcctccccctggggcacagagatatattatatataaagtcttgaaatttggtgtgtcttggggtggggaggggcaccaacgcctgcccctggggtccttttttttattttctgaaaatcactctcgggactgccgtcctcgctgctgggggcatatgccccagcccctgtaccacccctgctgttgcctgggcagggggaagggggggcacggtgcctgtaattattaaacatgaattcaattaagctcaaaaaaaaaaaaaaaa

SEQ ID NO: 531 - DNA, 2274 bp, Homo sapiens
atggcgggtctgacggcggcggccccgcggcccggagtcctcctgctcctgctgtccatcctccacccctctcggcctggaggggtccctggggccattcctggtggagttcctggaggagtcttttatccaggggctggtctcggagcccttggaggaggagcgctggggcctggaggcaaacctcttaagccagttcccggagggcttgcgggtgctggccttggggcagggctcggcgccttccccgcagttacctttccgggggctctggtgcctggtggagtggctgacgctgctgcagcctataaagctgctaaggctggcgctgggcttggtggtgtcccaggagttggtggcttaggagtgtctgcaggtgcggtggttcctcagcctggagccggagtgaagcctgggaaagtgccgggtgtggggctgccaggtgtatacccaggtggcgtgctcccaggagctcggttccccggtgtgggggtgctccctggagttcccactggagcaggagttaagcccaaggctccaggtgtaggtggagcttttgctggaatcccaggagttggaccctttgggggaccgcaacctggagtcccactggggtatcccatcaaggcccccaagctgcctggtggctatggactgccctacaccacagggaaactgccctatggctatgggcccggaggagtggctggtgcagcgggcaaggctggttacccaacagggacaggggttggcccccaggcagcagcagcagcggcagctaaagcagcagcaaagttcggtgctggagcagccggagtcctccctggtgttggaggggctggtgttcctggcgtgcctggggcaattcctggaattggaggcatcgcaggcgttgggactccagctgcagctgcagctgcagcagcagccgctaaggcagccaagtatggagctgctgcaggcttagtgcctggtgggccaggctttggcccgggagtagttggtgtcccaggagctggcgttccaggtgttggtgtcccaggagctgggattccagttgtcccaggtgctgggatcccaggtgctgcggttccaggggttgtgtcaccagaagcagctgctaaggcagctgcaaaggcagccaaatacggggccaggcccggagtcggagttggaggcattcctacttacggggttggagctgggggctttcccggctttggtgtcggagtcggaggtatccctggagtcgcaggtgtccctagtgtcggaggtgttcccggagtcggaggtgtcccgggagttggcatttcccccgaagctcaggcagcagctgccgccaaggctgccaagtacggagtggggaccccagcagctgcagctgctaaagcagccgccaaagccgcccagtttgggttagttcctggtgtcggcgtggctcctggagttggcgtggctcctggtgtcggtgtggctcctggagttggcttggctcctggagttggcgtggctcctggagttggtgtggctcctggcgttggcgtggctcccggcattggccctggtggagttgcagctgcagcaaaatccgctgccaaggtggctgccaaagcccagctccgagctgcagctgggcttggtgctggcatccctggacttggagttggtgtcggcgtccctggacttggagttggtgctggtgttcctggacttggagttggtgctggtgttcctggcttcggggcaggtgcagatgagggagttaggcggagcctgtcccctgagctcagggaaggagatccctcctcctctcagcacctccccagcaccccctcatcacccagggtacctggagccctggctgccgctaaagcagccaaatatggagcagcagtgcctggggtccttggagggctcggggctctcggtggagtaggcatcccaggcggtgtggtgggagccggacccgccgccgccgctgccgcagccaaagctgctgccaaagccgcccagtttggcctagtgggagccgctgggctcggaggactcggagtcggagggcttggagttccaggtgttgggggccttggaggtatacctccagctgcagccgctaaagcagctaaatacggtgctgctggccttggaggtgtcctagggggtgccgggcagttcccacttggaggagtggcagcaagacctggcttcggattgtctcccattttcccaggtggggcctgcctggggaaagcttgtggccggaagagaaaatga

SEQ ID NO: 532 - DNA, 3482 bp, Homo sapiens
ccctaccgcccccaattccgccctgcccccgccgcggcggcgctagccgccactgagggaccgaccctataaaggccgctccgcgaggggtgcgcagcattcggcagagggcgcttcgacgggctgggctgtgcgcctgcgcagtgtgggtcgctcccgattccctgccccggccggccccgcctcggctccgcaccctcgccccgctctcagccgccgctctgccccgcagcagccagccccgtgtccggcagtatgttcagctgggtcagcaaggatgcccgccgcaagaaggagccggagctcttccagacggtggctgaggggctgcggcagctgtacgcgcagaagctgctacccctggaggagcactaccgcttccacgagttccactcgcccgcgctggaggacgctgacttcgacaacaagcctatggtgctcctcgtggggcagtacagcacgggcaagaccaccttcatccgacacctgatcgagcaggacttcccggggatgcgcatcgggcccgagcccaccaccgactccttcatcgccgtcatgcacggccccactgagggcgtggtgccgggcaacgcgctcgtggtggacccgcggcgccccttccgcaagctcaacgcgtttggcaacgctttcctcaacaggttcatgtgtgcccagctgcccaaccccgtcctggacagcatcagcatcatcgacacccccgggatcctgtctggagagaagcagcggatcagcagaggctatgactttgcagccgtcctggagtggttcgcggagcgtgtggaccgcatcatcctgctcttcgacgcccacaagctggacatctccgatgagttctcggaagtgatcaaggctctgaagaaccatgaggacaagatccgcgtggtgctgaacaaggcagaccagatcgagacgcagcagctgatgcgggtgtacggggccctcatgtggtccctgggcaagatcatcaacacccccgaggtggtcagggtctacatcggctccttctggtcccacccgctcctcatccccgacaaccgcaagctctttgaggccgaggagcaggacctcttcaaggacatccagtcactgccccgaaacgccgccctcaggaagctcaatgacctgatcaagcgggcacggctggccaaggttcacgcctacatcatcagctccctcaagaaagagatgcccaatgtctttggtaaagagagcaaaaagaaagagctggtgaacaacctgggagagatctaccagaagattgagcgcgagcaccagatctcccctggggacttcccgagcctccgcaagatgcaggaactcctgcagacccaggacttcagcaagttccaggcgctgaagcccaagctgctggacacggtggatgacatgctggccaacgacatcgcgcggctgatggtgatggtgcggcaggaggagtccctgatgccttcccaggtggtcaagggcggcgcctttgacggcaccatgaacgggccgttcgggcacggctacggcgagggggccggcgagggcatcgacgacgtggagtgggtggtgggcaaggacaagcccacctacgacgagatcttctacacgctgtcccctgtcaacggcaagatcacgggcgccaacgccaagaaggagatggtgaagtccaagctccccaacaccgtgctagggaagatctggaagctggccgacgtggacaaggacgggctgctggacgacgaggagttcgcgctggccaaccacctcatcaaggtcaagctggagggccacgagctgcccgccgacctgcccccgcacctggtgccgccctccaagcgcagacatgagtgatggcgcccggccccgcacctgccatttgcacgcccggccgggaggcagagacggggggaggggaagcctcaccatttctcaaggtccataaagactgagcggatgtttcctcgcctctcgaaaaggaaaaccaccatctttcttttaaggctgttcctgggcctggcgggggaggcaggggtgagaggatggaattgtgtgcacaagaactgtggctattttaatatataacgttagaggctgcgttctttgtcgccgcctcccctgtgtgccagccctgtgtgcacggcctctgccccccggcctttgctgtggctggagctggacagtgcagcgactgcgaccgtgggggagccaggtcgcccttttggcagctgctaggctgaggctgcatggacaggaacaccaggcaccctccgtgtgcttctgagctgaggttgcttcacgggaccgtggcttccttcctcacctggctctgcctcccccgtgctctcgggcgaagtgggttcttgtgccttcccctcccgggcccaggctccccgtgcgcgggccctgccctttcctcccgcgccccaccggctccgacgcgcaaccccgctcagcagtcacagaagcagggcccagccaccttggtctttttttgggagttcaggggagtaggagaatgtcttccagaaaaatacataagctagtttctgttctgtaaagtgatatctttcatacttgaccaaagttcccaataacttcccaaccactgttcaaaagctgtgatttttgtctccccttcccaccctccagccaaggagcagccctgcccagggggcattaggtgtgggtacccggggagcaccccgttcctggaccccagtgttgcatttcctggctgaggaagggtggtcatcccagctcctgccctaccctctcacttaactggagctttgggacgcaccctccacagtgggaggtggtggtgggtggcggtggcggggcctcacgacagcttggtgctggtaagaggaagcccgtggttctggctaggctctcatgtccagacagcggggaccaggggaaaacccagccccttctgtaatcccccttcatttcctaccttccttcctcctctgtttagcaaaggagggcagctcacttggatgtccttacaacgcccctggcccccaggttgagcaataagaaaccagaaccttgcggcccagtggcccgggccagttcaggccgcctccccctcctctgcctggggccattgagcccagcctccagggcccgggcgcgtttgcaggccagtggccactgtccgggctgtgatggcaccaaggcaggtggagcaccaggtaccacacagctgggcttcccaccaggctttcccgcgggggtctcagggagcttctccccagcgctgctcggagtctgcaggaactggccttgttctccttagcccgtcactccatacagtattaggtgaggatggatgcgggcgctgtccttgccgggaagtcactgttgaagttgcagtggcttgttcacacctgtgggaagagaagtgaagactttctccttgcattaaaaagtctgaactgtgaaaaaaaaaaaaaaaaaaaaaaaaa

SEQ ID NO: 533 - DNA, 1410 bp, Homo sapiens
tccggcggggcccggcaggcgccgaggaggaagagcgagcccggacggcgcctctcgaacgagtgtgggcgcgaggcaggatgacgacctcaggcgcgctctttccaagcctggtgccaggctctcggggcgcctccaacaagtacttggtggagtttcgggcgggaaagatgtccctgaaggggaccaccgtgactccggataagcggaaagggctggtgtacattcagcagacggacgactcgcttattcacttctgctggaaggacaggacgtccgggaacgtggaagacgacttgatcatcttccctgacgactgtgagttcaagcgggtgccgcagtgccccagcgggagggtctacgtgctgaagttcaaggcagggtccaagcggcttttcttctggatgcaggaacccaagacagaccaggatgaggagcattgccggaaagtcaacgagtatctgaacaaccccccgatgcctggggcgctgggggccagcggaagcagcggccacgaactctctgcgctaggcggtgagggtggcctgcagagcctgctgggaaacatgagccacagccagctcatgcagctcatcggaccagccggcctcggaggactgggtgggctgggggccctgactggacctggcctggccagcttactggggagcagtgggcctccagggagcagctcctcctccagctcccggagccagtcggcagcggtcaccccgtcatccaccacctcttccacccgtgccaccccagccccttctgctccagcagctgcctcagcaactagcccgagccccgcgcccagttccgggaatggagccagcacagcagccagcccgacccagcccatccagctgagcgacctccagagcatcctggccacgatgaacgtaccagccgggccagcaggcggccagcaagtggacctggccagtgtgctgacgccggagataatggctcccatcctcgccaacgcggatgtccaggagcgcctgcttccctacttgccatctggggagtcgctgccgcagaccgcggatgagatccagaataccctgacctcgccccagttccagcaggccctgggcatgttcagcgcagccttggcctcggggcagctgggccccctcatgtgccagttcggtctgcctgcagaggctgtggaggccgccaacaagggcgatgtggaagcgtttgccaaagccatgcagaacaacgccaagcccgagcagaaagagggcgacacgaaggacaagaaggacgaagaggaggacatgagcctggactgagccacgcgccgtcctccgaggaactgggcgcttgcagtgcgttgcacaccctcacctcccacccactgattattaataaagtcttttcttttacctgccaaaaaaa

SEQ ID NO: 534 - DNA, 125 bp, Homo sapiens
  misc_feature (52)..(52): n is a, c, g, or t
  misc_feature (70)..(71): n is a, c, g, or t
ggcacgagcgctgtcttgtggacccgcacttcccacccgagacctctcactnagcccgagccgcgccgannatgagccacgggaagggaaccagcatgctcccggagatcgccgccgccgtgggt

SEQ ID NO: 535 - DNA, 3387 bp, Homo sapiens; identical to SEQ ID NO: 496

SEQ ID NO: 536 - DNA, 2088 bp, Homo sapiens
cggagagaagagagagcccggccagacccactgcgatgagacagcaggacgcgcccaagcccactcctgcagcccgccgctgctccggcctggcccggagggtgctgaccatcgccttcgccctgctcatcctgggcctcatgacctgggcctacgccgccggggtgccgctggcctccgatcgctacggcctcctggccttcggcctctacggggccttcctttcagcgcacctggtggcgcagagcctcttcgcgtacctggagcaccggcgggtggcggcggcggcgcgggggccgctggatgcagccaccgcgcgcagtgtggcgctgaccatctccgcctaccaggaggaccccgcgtacctgcgccagtgcctggcgtccgcccgcgccctgctgtacccgcgcgcgcggctgcgcgtcctcatggtggtggatggcaaccgcgccgaggacctctacatggtcgacatgttccgcgaggtcttcgctgacgaggaccccgccacgtacgtgtgggacggcaactaccaccagccctgggaacccgcggcggcgggcgcggtgggcgccggagcctatcgggaggtggaggcggaggatcctgggcggctggcagtggaggcgctggtgaggactcgcaggtgcgtgtgcgtggcgcagcgctggggcggcaagcgcgaggtcatgtacacagccttcaaggcgctcggagattcggtggactacgtgcaggtctgtgactcggacacaaggttggaccccatggcactgctggagctcgtgcgggtactggacgaggacccccgggtaggggctgttggtggggacgtgcggatccttaaccctctggactcctgggtcagcttcctaagcagcctgcgatactgggtagccttcaatgtggagcgggcttgtcagagctacttccactgtgtatcctgcatcagcggtcctctaggcctatataggaataacctcttgcagcagtttcttgaggcctggtacaaccagaagttcctgggtacccactgtacttttggggatgaccggcacctcaccaaccgcatgctcagcatgggttatgctaccaagtacacctccaggtcccgctgctactcagagacgccctcgtccttcctgcggtggctgagccagcagacacgctggtccaagtcgtacttccgtgagtggctgtacaacgcgctctggtggcaccggcaccatgcgtggatgacctacgaggcggtggtctccggcctgttccccttcttcgtggcggccactgtgctgcgtctgttctacgcgggccgcccttgggcgctgctgtgggtgctgctgtgcgtgcagggcgtggcactggccaaggcggccttcgcggcctggctgcggggctgcctgcgcatggtgcttctctcgctctacgcgcccctctacatgtgtggcctcctgcctgccaagttcctggcgctagtcaccatgaaccagagtggctggggcacctcgggccggcggaagctggccgctaactacgtccctctgctgcccctggcgctctgggcgctgctgctgcttgggggcctggtccgcagcgtagcacacgaggccagggccgactggagcggcccttcccgcgcagccgaggcctaccacttggccgcgggggccggcgcctacgtgggctactgggtggccatgttgacgctgtactgggtgggcgtgcggaggctttgccggcggcggaccgggggctaccgcgtccaggtgtgagtccagccacgcggatgccgcctcaagggtcttcaggggaggccagaggagagctgctgggccccgagccacgaacttgctgggtggttctctgggcctcagtttccctcctctgccaaacgagggggtcagcccaagattcttcagtctggactatattgggactgggacttctgggtctccagggagggtatttattggtcaggatgtgggatttgaggagtggaggggaaagggtcctgctttctcctcgttcttatttaatctccatttctactgtgtgatcaggatgtaataaagaattttatttattttc

SEQ ID NO: 537 - DNA, 1520 bp, Homo sapiens
ggctgctgctccggcgcggagcccagagccggttcggcgcgtcgactgcccagagtccgcggccggggcgcgggaggagccaagccgccatggcctaccacagcttcctggtggagcccatcagctgccacgcctggaacaaggaccgcacccagattgccatctgccccaacaaccatgaggtgcatatctatgaaaagagcggtgccaaatggaccaaggtgcacgagctcaaggagcacaacgggcaggtgacaggcatcgactgggcccccgagagtaaccgtattgtgacctgcggcacagaccgcaacgcctacgtgtggacgctgaagggccgcacatggaagcccacgctggtcatcctgcggatcaaccgggctgcccgctgcgtgcgctgggcccccaacgagaacaagtttgctgtgggcagcggctctcgtgtgatctccatctgttatttcgagcaggagaatgactggtgggtttgcaagcacatcaagaagcccatccgctccaccgtcctcagcctggactggcaccccaacaatgtgctgctggctgccggctcctgtgacttcaagtgtcggatcttttcagcctacatcaaggaggtggaggaacggccggcacccaccccgtggggctccaagatgccctttggggaactgatgttcgaatccagcagtagctgcggctgggtacatggcgtctgtttctcagccagcgggagccgcgtggcctgggtaagccacgacagcaccgtctgcctggctgatgccgacaagaagatggccgtcgcgactctggcctctgaaacactaccactgctggcgctgaccttcatcacagacaacagcctggtggcagcgggccacgactgcttcccggtgctgttcacctatgacgccgccgcggggatgctgagcttcggcgggcggctggacgttcctaagcagagctcgcagcgtggcttgacggcccgcgagcgcttccagaacctggacaagaaggcgagctccgagggtggcacggctgcgggcgcgggcctagactcgctgcacaagaacagcgtcagccagatctcggtgctcagcggcggcaaggccaagtgctcgcagttctgcaccactggcatggatggcggcatgagtatctgggatgtgaagagcttggagtcagccttgaaggacctcaagatcaaatgacctgtgaggaatatgttgccttcatcctagctgctggggaagcggggagaggggtcagggaggctaatggttgctttgctgaatgtttctggggtaccaatacgagttcccataggggctgctccctcaaaaagggaggggacagatggggagcttttcttacctattcaaggaatacgtgcctttttcttaaatgctttcatttattgaaaaaaaaaaaaaatgcccccaaagcactatgctggtcatgaactgcttcaaaatgtggaggtaataaaatgcaactgtgtaaaaaaaaaaaaaaaaaaaaaa

SEQ ID NO: 538 - DNA, 4064 bp, Homo sapiens
atgcccgggccccgaggggctgctggcggcctggcccctgagatgcgcggggcgggggcggcggggctgctggcgctgctgctgctgctgctgctgctgctgctgggcctgggcggcagggtcgagggggggccggccggcgagcggggcgcaggcgggggcggggcgctggcccgcgagcgcttcaaggtggtctttgcgccggtgatctgcaagcggacctgtctcaagggccagtgtcgggacagttgtcagcagggctccaacatgacgctcatcggagagaacggccacagcacagacacgctcacgggctccggcttccgcgtggtggtgtgccctctcccctgcatgaatggcggccagtgctcctcgcgaaaccagtgcctgtgtcccccggacttcactgggcgcttctgccaggtgcccgcaggaggagccggtgggggtaccggcggctcaggccccggcctgagcaggacaggggccctgtccacaggggcgctgccgcccctggctccggagggcgactctgtggccagcaagcacgccatctacgccgtccaggtgatcgctgaccctcctgggcccggggaggggcctcctgcccagcacgcagccttcctggtgcccctaggcccgggacagatctcagcagaagtgcaggccccgccccccgtggtgaatgtgcgcgtccatcacccgcccgaggcctcagtccaggtgcaccgcattgagagctcgaacgccgagagcgcagccccctcccagcacctgctgccgcaccccaagccctcgcacccccggccgcccacccagaagcccctgggccgctgctttcaggacactctgcccaagcagccgtgtggcagcaaccccctccccggcctcaccaagcaggaagactgctgcggtagcatcggcactgcctggggccagagcaagtgccacaagtgtccccagctgcagtacacaggagtgcagaagccagggcctgtacgtggggaagtgggcgctgactgtccccagggctacaagaggcttaacagcacccactgccaggacatcaacgagtgcgcaatgccgggcgtgtgtcgccatggtgactgcctcaacaaccctggctcctatcgctgtgtctgcccacctggccatagtttaggcccctcccgtacacagtgcattgcagacaaaccggaggagaagagcctgtgtttccgcctggtgagccctgagcaccagtgccagcacccactgaccacccgcctgacccgccagctctgctgctgcagtgtcggcaaggcctggggcgcgcggtgtcagcgctgcccaacagatggcaccgctgcgttcaaggagatctgcccagctgggaagggataccacattctcacctcccaccagacgctcaccattcagggcgagagtgacttttcccttttcctgcaccctgacgggccacccaagccccagcagcttccggagagccctagccaggctccaccacctgaggacacagaggaagagagaggggtgaccacggactcaccggtgagtgaggagaggtcagtgcagcagagccacccaactgccaccacgactcctgcccggccctaccccgagctgatctcccgtccctcgcccccgaccatgcgctggttcctgccggacttgcctccttcccgcagcgccgtagagatcgctcccactcaggtcacagagactgatgagtgccgactgaaccagaacatctgtggccacggagagtgcgtgccgggcccccctgactactcctgccactgcaaccccggctaccggtcacatccccagcaccgctactgcgtggatgtgaacgagtgcgaggcagagccctgtggcccggggaggggcatctgcatgaacaccggcggctcctacaattgccactgcaaccgcggctaccgcctgcacgtgggcgccggggggcgctcgtgcgtggacctgaacgaatgcgccaagccccacctgtgcggcgacggcggcttctgcatcaactttcccggtcactacaagtgcaactgctaccccggctaccggctcaaagcctcccggcctcctgtgtgcgaagacatcgacgagtgccgggacccaagctcttgcccggatggcaaatgcgagaacaagcccgggagcttcaagtgcatcgcctgtcagcctggctaccgcagccaggggggcggggcctgtcgcgacgtgaacgagtgcgccgagggcagcccctgctcgcctggctggtgcgagaacctcccgggctccttccgctgcacctgtgcccagggctacgcgcccgcgcccgacggccgcagttgcttggatgtggacgagtgtgaggctggggacgtgtgtgacaatggcatctgcagcaacacgccaggatctttccagtgtcagtgcctctctggctaccatctgtccagggaccggagccactgcgaggacattgatgagtgtgacttccctgcagcctgcattgggggtgactgcatcaataccaatggctcctacagatgtctttgcccccaggggcatcggctggtgggtggcaggaaatgccaagacatagatgagtgcagccaggacccgagcctgtgccttccccatggggcctgcaagaaccttcagggctcctatgtgtgtgtctgcgatgagggcttcactcccacccaggaccagcacggttgtgaggaggtggagcagccccaccacaagaaggagtgctacctgaacttcgatgacacagtgttctgcgacagcgtattggccaccaacgtgacccagcaggagtgctgctgctctctgggggccggctggggcgaccactgcgaaatctacccctgcccagtctacagctcagccgagttccacagcctctgcccagacggaaagggctacacccaggacaacaacatcgtcaactacggcatcccagcccaccgtgacatcgacgagtgcatgttgttcgggtcggagatttgcaaggagggcaagtgcgtgaacacgcagcctggctacgagtgctactgcaagcagggcttctactacgacgggaacctgctggaatgcgtggacgtggacgagtgcctggacgagtccaactgccggaacggagtgtgtgagaacacgcgcggcggctaccgctgtgcctgcacgccccctgccgagtacagtcccgcgcagcgccagtgcctgagcccggaagagatggagcgtgccccggagcggcgcgacgtgtgctggagccagcgcggagaggacggcatgtgcgctggccccctggccgggcctgccctcaccttcgacgactgctgctgccgccagggccgcggctggggcgcccaatgccgaccgtgcccgccgcgcggcgcggggtcccattgcccgacatcgcagagcgagagcaattccttctgggacacaagccccctgctgttggggaagcccccaagagatgaggacagttcagaggaggattcagacgagtgtcgctgcgtgagtggccgctgcgtgccgcggccgggcggcgccgtgtgcgagtgtcccggcggcttccagctcgacgcctcccgcgcccgctgcgtggatatcgacgagtgccgagagctgaaccagcgcgggctgctgtgcaagagcgagcgctgcgtgaacaccagcggctccttccgctgcgtctgcaaagccggcttcgcgcgcagccgcccgcacggggcctgcgttccccagcgccgccgctgacgccgccgacgccgccctcggcccagacctcggtgatcactgagggatttccgcgagctcggcctcacttctgccccgacttgtggctcggacccagggaccttcagggcccgcagaccctcccggcgccttgagacccgaggcgcccctaccggcccccctccccggttagcgggcggttgtaaggtctccggcgggcgctgcctgccttcctcccagagggtgtttcctagaaactgataaatcagatcgtgcctctttacccttggctttcgaaaaaaaaaaaaaaaaaa

SEQ ID NO: 539 - DNA, 2291 bp, Homo sapiens
ctttctgtgctgatcttggaggcagagtggctgcctgcattcattccacggtccattccacagcttgttccaaagacagtctgctcatgatgtagcttctgcacttgacaaattattttcatgcacgaggcccttgaaaatgttgacagtcttgtgacatccatggagggccttatttgacggtcacaaaggagcggttcctagaaggtgagcgcggacggtatgcaaagttgtgaatccagtggtgacagtgcggatgaccctctcagtcgcggcctacggagaaggggacagcctcgtgtggtggtgatcggcgccggcttggctggcctggctgcagccaaagcacttcttgagcagggtttcacggatgtcactgtgcttgaggcttccagccacatcggaggccgtgtgcagagtgtgaaacttggacacgccacctttgagctgggagccacctggatccatggctcccatgggaaccctatctatcatctagcagaagccaacggcctcctggaagagacaaccgatggggaacgcagcgtgggccgcatcagcctctattccaagaatggcgtggcctgctaccttaccaaccacggccgcaggatccccaaggacgtggttgaggaattcagcgatttatacaacgaggtctataacttgacccaggagttcttccggcacgataaaccagtcaatgctgaaagtcaaaatagcgtgggggtgttcacccgagaggaggtgcgtaaccgcatcaggaatgaccctgacgacccagaggctaccaagcgcctgaagctcgccatgatccagcagtacctgaaggtggagagctgtgagagcagctcacacagcatggacgaggtgtccctgagcgccttcggggagtggaccgagatccccggcgctcaccacatcatcccctcgggcttcatgcgggttgtggagctgctggcggagggcatccctgcccacgtcatccagctagggaaacctgtccgctgcattcactgggaccaggcctcagcccgccccagaggccctgagattgagccccggggtgagggcgaccacaatcacgacactggggagggtggccagggtggagaggagccccgggggggcaggtgggatgaggatgagcagtggtcggtggtggtggagtgcgaggactgtgagctgatcccggcggaccatgtgattgtgaccgtgtcgctaggtgtgctaaagaggcagtacaccagtttcttccggccaggcctgcccacagagaaggtggctgccatccaccgcctgggcattggcaccaccgacaagatctttctggaattcgaggagcccttctggggccctgagtgcaacagcctacagtttgtgtgggaggacgaagcagagagccacaccctcacctacccacctgagctctggtaccgcaagatctgcggctttgatgtcctctacccgcctgagcgctacggccatgtgctgagcggctggatctgcggggaggaggccctcgtcatggagaagtgtgatgacgaggcagtggccgagatctgcacggagatgctgcgtcagttcacagggaaccccaacattccaaaacctcggcgaatcttgcgctcggcctggggcagcaacccttacttccgcggctcctattcatacacgcaggtgggctccagcggggcggatgtggagaagctggccaagcccctgccgtacacagagagctcaaagacagcgcccatgcaggtgctgttttccggtgaggccacccaccgcaagtactattccaccacccacggtgctctgctgtccggccagcgtgaggctgcccgcctcattgagatgtaccgagacctcttccagcaggggacctgagggctgtcctcgctgctgagaagagccactaactcgtgacctccagcctgccccttgctgccgtgtgctcctgccttcctgatcctctgtagaaaggatttttatcttctgtagagctagccgccctgactgccttcagacctggccctgtagcttttctttttctccaggctgggccgtgagcaggtgggccgttgagttacctctgtgctggatcccgtgcccccacttgcctaccctctgtcctgccttgttattgtaagtgccttcaatactttgcattttgggataataaaaaaggctccctcccctgccaaaaaaaaaaaaaaaaaaaaaaaaaaaaaaaaaaaaaaaaaaaaaaaaaaaaaaaaaaaaaaaaaacaaaaaaaaaaaaaaaaagc

SEQ ID NO: 540 - DNA, 5815 bp, Homo sapiens
gaaggcagtttccggagggaaggggtagggttggggtgggggcgctctccgcccggtgttgcgctccttcccagaatccgctccggcctttccttcctgccgcgattcccaactttgctcaaagtcgctggactctaagctgtcggagggaccgctggacagacctgggaactgacagagggcctggagggaaacaggccaaagacccacaggcagagttgacacggaaccccaaagcaaggaggagggctcgggccgagaccgttcacctccccttatccctgttcccctcttcaggatggagctgacctcaagggaaagagggaggggacagcctctgccctgggaacttcgactgggcctactgctaagcgtgctggctgccacactggcacaggcccctgccccggatgtgcctggctgttccaggggaagctgctaccccgccacgggcgacctgctggtgggccgagctgacagactgactgcctcatccacttgtggcctgaatggcccccagccctactgcatcgtcagtcacctgcaggacgaaaagaagtgcttcctttgtgactcccggcgccccttctctgctagagacaacccacacagccatcgcatccagaatgtagtcaccagctttgcaccacagcggcgggcagcctggtggcagtcagagaatggtatccctgcggtcaccatccagctggacctggaggctgagtttcatttcacacacctcattatgaccttcaagacatttcgccctgctgccatgctggtggaacgctcagcagactttggccgaacctggcatgtgtaccgatatttctcctatgactgtggggctgacttcccaggagtcccactagcacccccacggcactgggatgatgtagtctgtgagtcccgctactcagagattgagccatccactgaaggcgaggtcatctatcgtgtgctggaccctgccatccctatcccagacccctacagctcacggattcagaacctgttgaagatcaccaacctacgggtgaacctgactcgtctacacacgttgggagacaacctactcgacccacggagggagatccgagagaagtactactatgccctctatgagctggttgtacgtggcaactgcttctgctacggacacgcctcagagtgtgcacccgccccaggggcaccagcccatgctgagggcatggtgcacggagcttgcatctgcaaacacaacacacgtggcctcaactgcgagcagtgtcaggatttctatcgtgacctgccctggcgtccggctgaggacggccatagtcatgcctgtaggaagtgtgagtgccatgggcacacccacagctgccacttcgacatggccgtatacctggcatctggcaatgtgagtggaggtgtgtgtgatggatgtcagcataacacagctgggcgccactgtgagctctgtcggcccttcttctaccgtgacccaaccaaggacctgcgggatccggctgtgtgccgctcctgtgattgtgaccccatgggttctcaagacggtggtcgctgtgattcccatgatgaccctgcactgggactggtctccggccagtgtcgctgcaaagaacatgtggtgggcactcgctgccagcaatgccgtgatggcttctttgggctcagcatcagtgaccgtctgggctgccggcgatgtcaatgtaatgcacggggcacagtgcctgggagcactccttgtgaccccaacagtggatcctgttactgcaaacgtctagtgactggacgtggatgtgaccgctgcctgcctggccactggggcctgagccacgacctgctcggctgccgcccctgtgactgcgacgtgggtggtgctttggatccccagtgtgatgagggcacaggtcaatgccactgccgccagcacatggttgggcgacgctgtgagcaggtgcaacctggctacttccggcccttcctggaccacctaatttgggaggctgaggacacccgagggcaggtgctcgatgtggtggagcgcctggtgacccccggggaaactccatcctggactggctcaggcttcgtgcggctacaggaaggtcagaccctggagttcctggtggcctctgtgccgaaggctatggactatgacctgctgctgcgcttagagccccaggtccctgagcaatgggcagagttggaactgattgtgcagcgtccagggcctgtgcctgcccacagcctgtgtgggcatttggtgcccaaggatgatcgcatccaagggactctgcaaccacatgccaggtacttgatatttcctaatcctgtctgccttgagcctggtatctcctacaagctgcatctgaagctggtacggacagggggaagtgcccagcctgagactccctactctggacctggcctgctcattgactcgctggtgctgctgccccgtgtcctggtgctagagatgtttagtgggggtgatgctgctgccctggagcgccaggccacctttgaacgctaccaatgccatgaggagggtctggtgcccagcaagacttctccctctgaggcctgcgcacccctcctcatcagcctgtccaccctcatctacaatggtgccctgccatgtcagtgcaaccctcaaggttcactgagttctgagtgcaaccctcatggtggtcagtgcctgtgcaagcctggagtggttgggcgccgctgtgacctctgtgcccctggctactatggctttggccccacaggctgtcaagcctgccagtgcagccacgagggggcactcagcagtctctgtgaaaagaccagtgggcaatgtctctgtcgaactggtgcctttgggcttcgctgtgaccgctgccagcgtggccagtggggattccctagctgccggccatgtgtctgcaatgggcatgcagatgagtgcaacacccacacaggcgcttgcctgggctgccgtgatcacacagggggtgagcactgtgaaaggtgcattgctggtttccacggggacccacggctgccatatgggggccagtgccggccctgtccctgtcctgaaggccctgggagccaacggcactttgctacttcttgccaccaggatgaatattcccagcagattgtgtgccactgccgggcaggctatacggggctgcgatgtgaagcttgtgcccctgggcactttggggacccatcaaggccaggtggccggtgccaactgtgtgagtgcagtgggaacattgacccaatggatcctgatgcctgtgacccccacacgggccaatgcctgcgctgtttacaccacacagagggtccacactgtgcccactgcaagcctggcttccatgggcaggctgcccgacagagctgtcaccgctgcacatgcaacctgctgggcacaaatccgcagcagtgcccatctcctgaccagtgccactgtgatccaagcagtgggcagtgcccatgcctccccaatgtccagggccctagctgtgaccgctgtgcccccaacttctggaacctcaccagtggccatggttgccagccttgtgcctgccacccaagccgggccagaggccccacctgcaacgagttcacagggcagtgccactgccgtgccggctttggagggcggacttgttctgagtgccaagagctccactggggagaccctgggttgcagtgccatgcctgtgattgtgactctcgtggaatagatacacctcagtgtcaccgcttcacaggtcactgcagctgccgcccaggggtgtctggtgtgcgctgtgaccagtgtgcccgtgcgttctcaggaatctttcctgcctgccatccctgccatgcatgcttcggggattgggaccgagtggtgcaggacttggcagcccgtacacagcgcctagagcagcgggcgcaggagttgcaacagacgggtgtgctgggtgcctttgagagcagcttctggcacatgcaggagaagctgggcattgtgcagggcatcgtaggtgcccgcaacacctcagccgcctccactgcacagcttgtggaggccacagaggagctgcggcgtgaaattggggaggccactgagcacctgactcagctcgaggcagacctgacagatgtgcaagatgagaacttcaatgccaaccatgcactaagtggtctggagcgagataggcttgcacttaatctcacactgcggcagctcgaccagcatcttgacttgctcaaacattcaaacttcctgggtgcctatgacagcatccggcatgcccatagccagtctgcagaggcagaacgtcgtgccaatacctcagccctggcagtacctagccctgtgagcaactcggcaagtgctcggcatcggacagaggcactgatggatgctcagaaggaggacttcaacagcaaacacatggccaaccagcgggcacttggcaagctctctgcccatacccacaccctgagcctgacagacataaatgagctggtgtgtggggcaccaggggatgcaccctgtgctacaagcccttgtgggggtgccggctgtcgagatgaggatgggcagccgcgctgtgggggcctcagctgcaatggggcagcggctacagcagacctagcactgggccgggcccggcacacacaggcagagctgcagcgggcactggcagaaggtggtagcatcctcagcagagtggctgagactcgtcggcaggcaagcgaggcacagcagcgggcccaggcagccctggacaaggctaatgcttccaggggacaggtggaacaggccaaccaggaacttcaagaacttatccagagtgtgaaggacttcctcaaccaggagggggctgatcctgatagcattgaaatggtggccacacgggtgctagagctctccatcccagcttcagctgagcagatccagcacctggcgggcgcgattgcagagcgagtccggagcctggcagatgtggatgcgatcctggcacgtactgtaggagatgtgcgtcgtgccgagcagctactgcaggatgcacggcgggcaaggagctgggctgaggatgagaaacagaaggcagagacagtacaggcagcactggaggaggcccagcgggcacagggtattgcccagggtgccatccggggggcagtggctgacacacgggacacagagcagaccctgtaccaggtacaggagaggatggcaggtgcagagcgggcactgagctctgcaggtgaaagggctcggcagttggatgctctcctggaggctctgaaattgaaacgggcaggaaatagtctggcagcctctacagcagaagaaacggcaggcagtgcccagggtcgtgcccaggaggctgagcagctgctacgcggtcctctgggtgatcagtaccagacggtgaaggccctagctgagcgcaaggcccaaggtgtgctggctgcacaggcaagggcagaacaactgcgggatgaggctcgggacctgttgcaagccgctcaggacaagctgcagcggctacaggaattggaaggcacctatgaggaaaatgagcgggcactggagagtaaggcagcccagttggacgggttggaggccaggatgcgcagcgtgcttcaagccatcaacttgcaggtgcagatctacaacacctgccagtgacccctgcccaaggcctaccccagttcctagcactgccccacatgcatgtctgcctatgcactgaagagctcttggcccggcagggcccccaataaaccagtgtgaacccccaaaaaaaaa

SEQ ID NO: 541 - DNA, 2001 bp, Homo sapiens
ggccgcggtggtggctgcggcggcggcggcgggagcagcatggattggggcactgagctgtgggatcagttcgaggtgctcgagcgccacacgcagtgggggctggacctgttggacagatatgtaaagttcgtgaaagaacgcaccgaagtggaacaggcttacgccaaacaactgcggagcctggtgaaaaaatatctgcccaagagacctgccaaggatgatcctgagtccaaattcagccagcaacagtccttcgtacagattctccaggaggtgaatgactttgcaggccagcgggagctggtggctgagaacctcagtgtccgtgtatgtcttgagctgaccaagtactcacaagagatgaaacaggagaggaagatgcacttccaagaagggcggcgggcccagcagcagctggaaaatggctttaaacagctggagaatagtaagcgtaaatttgagcgggactgccgggaggcagagaaggcagcccagactgctgaacggctagaccaggatatcaacgccaccaaggctgatgtggagaaggccaagcagcaagcccaccttcggagtcacatggccgaagaaagcaaaaacgaatatgcggctcaactgcagcgcttcaaccgagaccaagcccacttctatttttcacagatgccccagatattcgataagctccaagacatggatgaacgcagggccacccgcctgggtgccgggtatgggctcctgtcggaggccgagctggaggtggtgcccataatagccaagtgcttggagggcatgaaggtggctgcaaatgctgtggatcccaagaacgactcccacgtccttatagagctgcacaagtcaggttttgcccgcccgggcgacgtggaattcgaggacttcagccagcccatgaaccgtgcaccctccgacagcagtctgggcaccccctcggatggacggcctgaactccgaggcccgggtcgcagccgcaccaagcgctggccttttggcaagaagaacaagacagtggtgaccgaggattttagccacttgcccccagagcagcagcgaaaacggcttcaacagcagttggaagaacgcagtcgtgaacttcagaaggaggttgaccagagggaagccctaaagaaaatgaaggatgtctatgagaagacacctcagatgggggaccccgccagcttggagccccagatcgctgaaaccctgagcaacattgaacggctgaaattggaagtgcagaagtatgaggcgtggctggcagaagctgaaagtcgagtccttagcaaccggggagacagcctgagccggcacgcccggcctcccgacccccccgctagcgccccgccagacagcagcagcaacagcgcatcacaggacaccaaggagagctctgaagagcctccctcagaagagagccaggacacccccatttacacggagtttgatgaggatttcgaggaggaacccacatcccccataggtcactgtgtggccatctaccactttgaagggtccagcgagggcactatctctatggccgagggtgaagacctcagtcttatggaagaagacaaaggggacggctggacccgggtcaggcggaaagagggaggcgagggctacgtgcccacctcctacctccgagtcacgctcaattgaaccctgccagagacgggaagaggggggctgtcggctgctgcttctgggccacggggagccccaggacctatgcactttatttctgaccccgtggcttcggctgagacctgtgtaacctgctgccccctccacccccaacccagtcctacctgtcacaccggacggacccgctgtgccttctaccatcgttccaccattgatgtacatactcatgttttacatcttttctttctgcgctcggctccggccattttgttttatacaaaaatgggttttttttttttctttaatatatttcaagagatttttttttttttttttttt

SEQ ID NO: 542 - DNA, 2469 bp, Homo sapiens
tttccgacacaatccgtacacggccttccctcccgcagtgcccgggctgcctccgggcctcccgccggccgtctcctttggctccctgcagggggccttccagcccaagagcacgaaccctgagctgccaccacgactggggccggtgccgagcgggctctcccagaaggggacacagatccccgaccatttccggccacctttgaggaaaccagggaagtggtgtgccatgcacgtgcgtgtggcttacatgatcctgagacaccaggagaaaatgaagggtgactcccacaagcttgactttcggaatgacctcctgccctgccttccggggccctatggggccctgccccctgggcaggagctctcccacccggcctccctcttcactgcgactggtgccgtccacgctgcagccaaccctttcacggcagctcccggggcccacggacccttcctgagccccagcacccacattgatccctttgggcgtcccacaagcttcgcctctttggctgccctctccaacggggcctttggaggcctgggcagccccacattcaactccggcgccgtctttgcccagaaagaaagcccaggggccccaccagccttcgcctccccaccggacccatggggccgcctgcaccgcagtcctctgacctttcctgcctgggtccggccccctgaggccgcccggactccaggctcagacaaggagcggcctgtggagcggagggagccctccatcaccaaggaggagaaggacagggacctccccttctcacggccccagctccgagtttctcctgctactcccaaggcccgggctggtgaggaggggcctcggccaaccaaggaatctgtgcgggtaaaggaagagcggaaggaggaggctgccgccgccgctgccgctgctgctgccgccgccgctgccgccgccgcagcagccactgggccccagggccttcacctgctgtttgagaggccccggccgcccccgtttctgggccctagcccaccagatcgctgtgctggcttcctggagccaacctggttggcagcacccccacgcctggcaaggccaccccgcttctatgaggcgggtgaggagctaactggacccggggccgtggccgctgcccgcctctacggtctggaacctgctcaccccttgctctacagccgcttggctcctccaccaccacctgctgcggccccgggaacccctcaccttctcagcaagaccccaccgggagcccttttgggggcaccacctccgcttgtgcccgccccccggcccagttccccacctaggggccctggcccagctcgggctgacaggtgaggggaacgggggggggtcggggcaaagctccatctccccttcctttaaccaggtcctagggctgaggttttaagccagggctggagggcaaaggtcataacctcaccagccacctctgaggtcatggaacctgggaacagaagcctcaacccccacaagaccaagcatcacatggagtgtagggtcactgggagagcagaggtcacagcctctagagaagggagaggggcgtgtgcatgggagtgtggctcatctcgggggccatggggcctcctgaggtacacctttgcccctgtaagggcctctaggccctgggcctgcctccccaagggctcactaagccagaggccaaagtgccccctcccgttcacctaccacccaagtcctcatgccctccgagggctgggggaggaggggctcaaggaaggggggttccatgtacatatttatcacccctttcacatagccccaagaccttttgtacatttttacaggggtgcccctcccaacagttcccttcctggttaattaaaccctcagactggtgctgtgttcctagcctctggcctctctgtggggaaaggggactgcagggggaagagccgggaagggacagtcaggcttctccctgggaaggtggggccagcaggagatgaccaacagggggcaggacctggggacctgggctggagggaagggcagaagcttcctacttggctgacagccccggttcccccaacatgttcccgttcactctgcccccacccccaaaggctcagcctctaaatctcagactccaccacctcttaatggctcagtccccttcaccccatttccaagtgcccccaggactcctgggccctgcttccctgaaccctgttctccaaaaccctgccccaggctaagggtggccagagaaggtcaccatgtaccacacaccaaagaagggggtcggcccaggggtgggcgacacaggcagcttcttcggcagcctcacggcagcaaccccagccttcccaaagcagcaggcgcctccaggctggggcccaacctagaaggcaggggtcaatctaacaaaaccctaacgttgacttttttccctggtggggcttcttctgtaa

SEQ ID NO: 543 - DNA, 781 bp, Homo sapiens
acacagagagaaaggctaaagttctctggaggatgtggctgcagagcctgctgctcttgggcactgtggcctgcagcatctctgcacccgcccgctcgcccagccccagcacgcagccctgggagcatgtgaatgccatccaggaggcccggcgtctcctgaacctgagtagagacactgctgctgagatgaatgaaacagtagaagtcatctcagaaatgtttgacctccaggagccgacctgcctacagacccgcctggagctgtacaagcagggcctgcggggcagcctcaccaagctcaagggccccttgaccatgatggccagccactacaagcagcactgccctccaaccccggaaacttcctgtgcaacccagattatcacctttgaaagtttcaaagagaacctgaaggactttctgcttgtcatcccctttgactgctgggagccagtccaggagtgagaccggccagatgaggctggccaagccggggagctgctctctcatgaaacaagagctagaaactcaggatggtcatcttggagggaccaaggggtgggccacagccatggtgggagtggcctggacctgccctgggccacactgaccctgatacaggcatggcagaagaatgggaatattttatactgacagaaatcagtaatatttatatatttatatttttaaaatatttatttatttatttatttaagttcatattccatatttattcaagatgttttaccgtaataattattattaaaaatatgcttcta

SEQ ID NO: 544 - DNA, 2159 bp, Homo sapiens
tgtccggaccccagccagactgctgtgaactcttctgggcccggggactgccctgcctgccgtgtgcattgcaggagtgtgacgtcatgacctacgtgagggagacctgcgggtgctgcggtgaggcactgcccacggcagggtcggggcccatgcaccgggtggagggcgggagtgcagcagggctgggtcatcgctgggtcctgcatgtgcacgtgaccctagggtctgaggtctcccggtaccccccgatgaccctgccacccccccagactgtgagaagcgctgtggcgccctggacgtggtcttcgtcatcgacagctccgagagcattgggtacaccaacttcacactggagaagaacttcgtcatcaacgtggtcaacaggctgggtgccatcgctaaggaccccaagtccgagacaggtcacggggcagggcgggtgcagcattgcggggggccgcgggcgcgtgggaggcgatgagatgggagaagtccagacgcgtccctccaacgagggcctctgcatggctggggatgccccagaccccgaggcctctggcaacgacctcacgcgtgcggcttgcagggacgcgtgtgggcgtggtgcagtacagccacgagggcacctttgaggccatccagctggacgacgaacatatcgactccctgtcgagcttcaaggaggctgtcaagaacctcgagtggattgcaggtggcacctggacaccctcagccctcaagtttgcctacgaccgcctcatcaaggagagccggcgccagaagacacgtgtgtttgcggtggtcatcacggacgggcgccacgaccctcgggacgatgacctcaacttgcgggcgctgtgcgaccgcgacgtcacagtgacggccatcggcatcggggacatgttccacgagaagcacgagagtgaaaacctctactccatcgcctgcgacaagccacagcaggtgcgcaacatgacgctgttctccgacctggtcgctgagaagttcatcgatgacatggaggacgtcctctgcccgggtgtacgtgtgggcgcggggcagtcaggccgaggagcagcaggccccagccgcgtctagcgtgaccgccagggacacccctcacctgagggacgaatgtgcagcccaaggatcttgggctgtgggtgggaaggggtcggcctctcgggctgcagggcagacgcgccagctcgaccctgagcctgtctaggcagatcagtgaacggccgctgagggttcgctagggactgaccctggcctggccggcctctctcctctcttccagaccctcagatcgtgtgcccagaccttccctgccaaacaggtaatgcagggacctgagccaccaccccagactagcaaagcagccctggtgtccttcctcctcgagggccgggctgggggaggggccgtgcagggacccgggggcggcggacgactgcggaggctgctccttagggagatggccccaggatggcagcacaggggaggaggggcttggggaaggcaggctcccaggaacgcaggaacagcatcacgaggccatgaggtgggtgctgctagcctggcgctgtgctcggcatgtggccactggtcttgaaggcccaccatgggcttgcagtctccctcagctgccgcccagctcccatgggctggccgtgcatgtgccaccggaggaagccctggatcagtgagtgaaaccatcccggggtggaagcactgacaccccccagcaccagcaggtcttgctccaaccctggcctgcctcgatcgagctgcagctgcggctctcatctctgggagtgggggagcccatgtccggatgattggcccagcgtggtgtgaagctggagctgggggtgccgttcagctgctgctggactggtgctgcccccatggtgcactgctgcaaccgttgctgggcccacaggaggtccccgggggcggttatgtagctgagtccccctcattgagccgtccccttccaggagtgtgagggtggggatgccatggagacagggtgggagggtccagactgagaggaccacagggtaggaaacctccaagggtctgctggtactaagtcagcccttctcagcactcgggatcgcgatgtgcgatcgagagtccatggggag

SEQ ID NO: 545 - DNA, 1621 bp, Homo sapiens
gcggcaggtctctgcgcagcccagcccgccggtccacgccgcgcaccgctccgagggccagcgccacccgctccgcagccggcaccatgcgcgagatcgtgcacatccaggcgggccagtgcggcaaccagatcggcgccaagttttgggaggtcatcagcgatgagcatgggatcgaccccacaggcagttaccatggagacagtgacttgcagctggagagaatcaacgtgtactacaatgaggctgctggtaacaaatatgtacctcgggccatcctggtggatctggagcctggcaccatggactctgtcaggtctggacccttcggccagatcttcagaccagacaacttcgtgttcggccagagtggagccgggaataactgggccaagggccactacacagagggagccgagctggtcgactcggtcctggatgtggtgaggaaggagtcagagagctgtgactgtctccagggcttccagctgacccactctctggggggcggcacggggtccgggatgggcaccctgctcatcagcaagatccgggaagagtacccagaccgcatcatgaacaccttcagcgtcatgccctcacccaaggtgtcagacacggtggtggagccctacaacgccaccctctctgtccaccagctggtggaaaacacagatgaaacctactccattgataacgaggccctgtatgacatctgcttccgcaccctgaagctgaccacccccacctacggggacctcaaccacctggtgtcggccaccatgagcggggtcaccacctgcctgcgcttcccgggccagctgaacgcagacctgcgcaagctggcggtgaacatggtgcccttccctcgcctgcacttcttcatgcccggcttcgcgcccctgaccagccggggcagccagcagtaccgggcgctcacggtgcccgagctcacccagcagatgttcgactccaagaacatgatggccgcctgcgacccgcgccacggccgctacctgacggtggctgccatcttccggggccgcatgtccatgaaggaggtggacgagcagatgctcaacgtgcagaacaagaacagcagctacttcgtggagtggatccccaacaacgtgaagacggccgtgtgcgacatcccgccccgcggcctgaagatgtcggccaccttcatcggcaacagcacggccatccaggagctgttcaagcgcatctccgagcagttcacggccatgttccggcgcaaggccttcctgcactggtacacgggcgagggcatggacgagatggagttcaccgaggccgagagcaacatgaacgacctggtgtccgagtaccagcagtaccaggacgccacggccgacgaacaaggggagttcgaggaggaggagggcgaggacgaggcttaaaaacttctcagatcaatcgtgcatccttagtgaacttctgttgtcctcaagcatggtctttctacttgtaaactatggtgctcagttttgcctctgttagaaattcacactgttgatgtaatgatgtggaactcctctaaaaattacagtattgtctgtgaaggtatctatactaataaaaaagcatgtgtagaaaa

SEQ ID NO: 546 - DNA, 417 bp, Homo sapiens
tttgtacaaaaatatatttatttggtgtaatagttacaaaatattcatttccacaataatattttagcaatgcattggaatgttaaaaaaaattctttgtattaatgattcttgcaaagaccctcaaaacatcccaggggtagaactgtggttcaagaggaaaagcaatttccccaagtctctgtatctaaaaaacactagtaccatgaaagataaacttaaaacatcaataacttaaataagaattaacattacttaaggcataatgtttcacatcaacaaacaaaattcattatatgaaaataaaacagggtgtctggggaaagctaggggaaattaagttagctccacattcttgggttggggagggggtgtctagtcttcggattttgggtttgtttttccagtgggtcctgg

SEQ ID NO: 547 - DNA, 5518 bp, Homo sapiens
agggcgcgggagcgcggagcgagtttggttgcacttacaccggtacttaagcgcggaccggcgtgtccttggacttagagagtggggacgtccggcttcggagcgggagtgttcgttgtgccagcgactaaaaagagaattaaatatgggtgatgttgagaaaggcaagaagatttttattatgaagtgttcccagtgccacaccgttgaaaagggaggcaagcacaagactgggccaaatctccatggtctctttgggcggaagacaggtcaggcccctggatactcttacacagccgccaataagaacaaaggcatcatctggggagaggatacactgatggagtatttggagaatcccaagaagtacatccctggaacaaaaatgatctttgtcggcattaagaagaaggaagaaagggcagacttaatagcttatctcaaaaaagctactaatgagtaataattggccactgccttatttattacaaaacagaaatgtctcatgacttttttatgtgtaccatcctttaatagatctcatacaccagaattcagatcatgaatgactgacagaatattttgttgggcagtcctgatttaaaactaagactggcttgtggttaaatgaatatgttcagtttttgaattttaatagtaactccaattcagtaaatggtatcactgtttaccccttttaaagatatgattagacttcgttagtaatgttcaacttttcacaaagatggtgagtgccatcttaaaacttactggagattggttttatatttagatttatataactggttatgtgaatatatttaaatactggggaaattgcttcactgtcttagaaccaagcaagattcacctgtgttttgtgttcatgttcatttgcctcttaaaggcaagggttgaagataaataaggtagcaatgtctatagttttggccttaactatgccaatctaattataattccctgtatttaaaatggtttcttttacttattgaaaggcattttagtgtggtttatgtgtaatattaaagattattcaacacctctcacatcttacagatctataaggtcacatgcttttaaaatagtagcaagttaaacttcactcttgaattctttacaatctaagtcaaactaagttataatttaggattgtctttaaacagccattcagaaacaaaactgtagaactgtgtatttgattgggaatggtgcttttgccaacttaaaaggattaaagtaacggagatatacacaaattttaaaattatgtgtgatcacaagactaaagataattaaaaagaaaaccacagatcatgactttttgactgtgcttgatttcatgactgatgcacaaattttaatgattaaaaagtgcaggagccctaaatgtcagtgcagcagccctaaatgtcagtgcagcagtgttaaccagtcatggtgctagattgtttacttggttttctaggactgcctcaactagaataacacttcactaattgactcttagtttctttgctcagattgagaactgcagcatttatgccagacatggacagaggaatgcctgtggtcatagttttgtgatgtgtaacagtgtataattacatactgaattatttcatgcatagtctgtgccatacacatttagagtagtccttggagattttatggagatggtgagcacaaggtaagtcataaagaataatgagaaaataaatctatgctggtgcagctgagaactgtatctttgtgggacagtgagaagactgagaagatgtgaatccatggtctcaaaggtgatagggacgattagataggtgttttaaggcctgaaagcaatttataacatatgagtcttatttttatttatagaaatgtggaaagcttgctgtaattcatatttgaagtcctagtctgagttctggtggggaatttaaaaatgcatcctggaaatcctttaaagatttcagactttgaaaggccttgtagcagaggacttggtgactgtataaagttagtggtattcagggacagtgtagcaagtagcttacaaggggacaattctggactaatgagaaagacctgaagtgaaggctagagagttgattttttttttttttggcatcctggaaatgatacaggaaacatattaagatagatacagaaatgtgttcaaccttccatcttggctagttgtggcgtttagtttgttttttgagacatggtcacgctgtgtcgccaaggctggagtgcagtggtgcgatctcggctggctgcaacctctatttcccaggctcaagcgattctctcacttcagcttcccaagtagctgggactacaggtgttcgccaccatgcccagctaatttttttgtagagatggagttttgccatgtggtcccaggctggtctcaaactcctgagctcaagcaatccgtccacttgccttggctccccaaagtgctgggattacaggcgtgagccaccaggccctgcctggttttcaaattcagaaatcttattatttaacccagaagtaatcagcccagtagtaacttaggtttaattttttttcaggtttaaaatttttctcatttattttttctgagacggagtttcgcccttttcgcccaggctgagtacagtggtgcaatctcactgcaacctccgccttccagttgcaagtgattctcctgcctcagcctcctgagtagctgggattacaggcacccgccaccacgcctggctaatttttgtatttttagtggagatggtgtttcaccatgttggccagactggtcttggactcctgacctcgtgatccacccaccttggcctcccaaagttctaggattacaggtgtgagccaccacgtccggccaatttttctcatttctatgcctcctatattaaggtctgtgttggcacagatgagtaactgccatgttctaggtcagttatacccaagcacttctggtggtttaaaatgtgattctgtaacttttttatttttatttttttgagataatttcactcttgttgcccaggctggagtgcaatggcgtgatcgctgctcaccgcaacctccgccttccaggttcaagcgattctcctgactcagcctctcaagtagctgggattacaagcatgcgccaccatgcccagcttattttgtgtttttagtagagacagggtttctccatgctggacaggctggtcttgaactcccgacgtcgggtgatctgcctgcctcggcctcccaaagtgctgggattacaggcgtgagccaccacgcctggccaattatgtaattttttaaaaaggacatttctatcagggatatataccttcagaaataaggaaataggggaaaaaaagagcactataaaccacatgttttcatttctagtgcttcgctgtaagtggctaggttggtagaatcaaaaacaagggccagatgtatttaaggggtattcagatgccacctacatgcttattttgtctagaacagtgctgtctaatagaactttctgtgacgatggatattttgtagacttttgctgtccagtgtggtagccactaaccacatgtggctgttaagcccttgaaatatagctagtgtgactagaaagtattttattttaaatttacataggcacaagtggctagtggctactgtattgacattctgggtctaggactagaaccagtggtctgtaacaaaagtactttctctttactctattaaatctagaattagccgggcatggtcgctcatgcctgtaatcccagcactttgggaggccaaggcaggcagatcacttgaggtcaggcgtttgagaccagcctggtcaacatggcgaaaccctgtctctacaaaaaacataaaagttagccaggtgtggtggtgggcacctgtaatctcagctacttgggaggctgaggcacaagaatcacttgaacttgggaggtggaggttgcagtgagccaagattgtgccactgcactcaagcctgggtgacgagtgaaactgtctccaaaaaaaaaaaaaaatctagaattcttggaagtacattatattgcccttcagaatagattccagttcctgttgtgctcacctttataattttaccataagttttacctattcgtaagttggcagttttagatagataacattctggtggtagctagggatttaccttttgtcatccttttcctgcacttctcttgaattcctttatagatgtacagttttgctttaaccactgaagattgctgtaaattataaagggtgtgatagaatccacatggctgtcaagaaggagatcttaccaaggacagttgactgactagtctcagattgtttcatatcatttatacttgggtaagagtaaactagataactgggcgtcgtggtgcacacctgtagtcccagccactctgaggcaggaggactgcttgtgcccagaagttcgaggctgcagtgtagctgtgattgtgctactgcactccagcctgggcaacagataaaggaaactccatctcttttaaaaaaaaaaaaagtggtctgggtgcagtaggtcatgcctgcaatcccagcactttgggaggccaaggcaggcagatcacctgaggtcaggagcttgagaccagcctggccaacatggtgaaaccccatctctaccaaaaatataaaaactagctgggcgtggtggcggcacctgtaattgcagctatttgagaggctgaggcaggagaatcgcttgaacctgggagatgggggttgcagtgagccaagaccgccccatcgcactccagcctgggcaacaatagtgaaactccgtctcaaaaagaaaaaaagtttccttagaatggaaaatattcattcatgagctcttttggcaatccgtcatcagtatattctgaaaaccaataagatgttgccaagttgggggcgagagctatgtaatgcaaggcatatgcctgatgaagtatacaaatacacctgaccagaaactttgtctcccacataagtctcttctaggcactgtcggggtacatactgagctgctgctttggctgtattttctgtgcctcagaataaccattgtcctggtgttcatatccttagagttcagtacaaaatgttggatatccatttaataggttccaggttatcttagttggagtttggggtatttgaaaacgtcatgccttcaggctatcatttccctcagaaagctaagtaaatttactgcattcatttctcaaagagtaaaagtgcaggttgtatgtgtctatgaacatttaaacatgttaaaatgttaaatttaacattttaaatttaaacatttaaatatgtctgtaacttgaacagtgtagtttcagaaaggaccactgggctagtgtaatgcagaaaatgctgggtctaggattaggagaaaattgtgtttagtgtgtatcaataaacagcccgtggacccaaaaaaaaaaaa

SEQ ID NO: 548 - DNA, 1832 bp, Homo sapiens
gagcggccaggccagcctcggagccagcagggagctgggagctgggggaaacgacgccaggaaagctatcgcgccagagagggcgacgggggctcgggaagcctgacagggcttttgcgcacagctgccggctggctgctacccgcccgcgccagcccccgagaacgcgcgaccaggcacccagtccggtcaccgcagcggagagctcgccgctcgctgcagcgaggcccggagcggccccgcagggaccctccccagaccgcctgggccgcccggatgtgcactaaaatggaacagcccttctaccacgacgactcatacacagctacgggatacggccgggcccctggtggcctctctctacacgactacaaactcctgaaaccgagcctggcggtcaacctggccgacccctaccggagtctcaaagcgcctggggctcgcggacccggcccagagggcggcggtggcggcagctacttttctggtcagggctcggacaccggcgcgtctctcaagctcgcctcttcggagctggaacgcctgattgtccccaacagcaacggcgtgatcacgacgacgcctacacccccgggacagtacttttacccccgcgggggtggcagcggtggaggtgcagggggcgcagggggcggcgtcaccgaggagcaggagggcttcgccgacggctttgtcaaagccctggacgatctgcacaagatgaaccacgtgacaccccccaacgtgtccctgggcgctaccggggggcccccggctgggcccgggggcgtctacgccggcccggagccacctcccgtttacaccaacctcagcagctactccccagcctctgcgtcctcgggaggcgccggggctgccgtcgggaccgggagctcgtacccgacgaccaccatcagctacctcccacacgcgccgcccttcgccggtggccacccggcgcagctgggcttgggccgcggcgcctccaccttcaaggaggaaccgcagaccgtgccggaggcgcgcagccgggacgccacgccgccggtgtcccccatcaacatggaagaccaagagcgcatcaaagtggagcgcaagcggctgcggaaccggctggcggccaccaagtgccggaagcggaagctggagcgcatcgcgcgcctggaggacaaggtgaagacgctcaaggccgagaacgcggggctgtcgagtaccgccggcctcctccgggagcaggtggcccagctcaaacagaaggtcatgacccacgtcagcaacggctgtcagctgctgcttggggtcaagggacacgccttctgaacgtcccctgcccctttacggacaccccctcgcttggacggctgggcacacgcctcccactggggtccagggagcaggcggtgggcacccaccctgggacctaggggcgccgcaaaccacactggactccggccctcctaccctgcgcccagtccttccacctcgacgtttacaagcccccccttccacttttttttgtatgttttttttctgctggaaacagactcgattcatattgaatataatatatttgtgtatttaacagggaggggaagagggggcgatcgcggcggagctggccccgccgcctggtactcaagcccgcggggacattgggaaggggacccccgccccctgccctcccctctctgcaccgtactgtggaaaagaaacacgcacttagtctctaaagagtttattttaagacgtgtttgtgtttgtgtgtgtttgttctttttattgaatctatttaagtaaaaaaaaaattggttctttaaaaaaaaaaaaaaaaa

SEQ ID NO: 549 - DNA, 976 bp, Homo sapiens
gcgggcggcgcaggagcggcactcgtggctgtggtggcttcggcagcggcttcagcagatcggcggcatcagcggtagcaccagcactagcagcatgttgagccgggcagtgtgcggcaccagcaggcagctggctccggctttggggtatctgggctccaggcagaagcacagcctccccgacctgccctacgactacggcgccctggaacctcacatcaacgcgcagatcatgcagctgcaccacagcaagcaccacgcggcctacgtgaacaacctgaacgtcaccgaggagaagtaccaggaggcgttggccaagggagatgttacagcccagacagctcttcagcctgcactgaagttcaatggtggtggtcatatcaatcatagcattttctggacaaacctcagccctaacggtggtggagaacccaaaggggagttgctggaagccatcaaacgtgactttggttcctttgacaagtttaaggagaagctgacggctgcatctgttggtgtccaaggctcaggttggggttggcttggtttcaataaggaacggggacacttacaaattgctgcttgtccaaatcaggatccactgcaaggaacaacaggccttattccactgctggggattgatgtgtgggagcacgcttactaccttcagtataaaaatgtcaggcctgattatctaaaagctatttggaatgtaatcaactgggagaatgtaactgaaagatacatggcttgcaaaaagtaaaccacgatcgttatgctgagtatgttaagctctttatgactgtttttgtagtggtatagagtactgcagaatacagtaagctgctctattgtagcatttcttgatgttgcttagtcacttatttcataaacaacttaatgttctgaataatttcttactaaacattttgttattgggcaagtgattgaaaatagtaaatgctttgtgtgattg

SEQ ID NO: 550 - DNA, 1866 bp, Homo sapiens
cgttcctcggcgccgccggggccccagagggcagcggcagcaacagcagcagcagcagcagcgggagtggagatggcggcggcggcggctcaggggggcgggggcggggagccccgtagaaccgagggggtcggcccgggggtcccgggggaggtggagatggtgaaggggcagccgttcgacgtgggcccgcgctacacgcagttgcagtacatcggcgagggcgcgtacggcatggtcagctcggcctatgaccacgtgcgcaagactcgcgtggccatcaagaagatcagccccttcgaacatcagacctactgccagcgcacgctccgggagatccagatcctgctgcgcttccgccatgagaatgtcatcggcatccgagacattctgcgggcgtccaccctggaagccatgagagatgtctacattgtgcaggacctgatggagactgacctgtacaagttgctgaaaagccagcagctgagcaatgaccatatctgctacttcctctaccagatcctgcggggcctcaagtacatccactccgccaacgtgctccaccgagatctaaagccctccaacctgctcagcaacaccacctgcgaccttaagatttgtgatttcggcctggcccggattgccgatcctgagcatgaccacaccggcttcctgacggagtatgtggctacgcgctggtaccgggccccagagatcatgctgaactccaagggctataccaagtccatcgacatctggtctgtgggctgcattctggctgagatgctctctaaccggcccatcttccctggcaagcactacctggatcagctcaaccacattctgggcatcctgggctccccatcccaggaggacctgaattgtatcatcaacatgaaggcccgaaactacctacagtctctgccctccaagaccaaggtggcttgggccaagcttttccccaagtcagactccaaagcccttgacctgctggaccggatgttaacctttaaccccaataaacggatcacagtggaggaagcgctggctcacccctacctggagcagtactatgacccgacggatgagccagtggccgaggagcccttcaccttcgccatggagctggatgacctacctaaggagcggctgaaggagctcatcttccaggagacagcacgcttccagcccggagtgctggaggccccctagcccagacagacatctctgcaccctggggcctggacctgcctcctgcctgcccctctcccgccagactgttagaaaatggacactgtgcccagcccggaccttggcagcccaggccggggtggagcatgggcctggccacctctctcctttgctgaggcctccagcttcaggcaggccaaggccttctcctccccacccgccctccccacggggcctcgggagctcaggtggccccagttcaatctcccgctgctgctgctgctgcgcccttaccttccccagcgtcccagtctctggcagttctggaatggaagggttctggctgccccaacctgctgaagggcagaggtggagggtggggggcgctgagtagggactcagggccatgcctgcccccctcatctcattcaaaccccaccctagtttccctgaaggaacattccttagtctcaagggctagcatccctgaggagccaggccgggccgaatcccctccctgtcaaagctgtcacttcgcgtgccctcgctgcttctgtgtgtggtgagcagaagtggagctggggggcgtggagagcccggcgcccctgccacctccctgacccgtctaatatataaatatagagatgtgtctatggctgaaaaaaaaaaaaaaaa

SEQ ID NO: 551 - DNA, 86 bp, Homo sapiens
attcccgcggtccttcagactgcccggagagcgcgctctgcctgccgcctgcctgcctgccactgagggttcccagcaccatgagg

SEQ ID NO: 552 - DNA, 2645 bp, Homo sapiens
cacaagaatactgaaaaatgaagcctaaaatgaagtattcaaccaacaaaatttccacagcaaagtggaagaacacagcaagcaaagccttgtgtttcaagctgggaaaatcccaacagaaggccaaagaagtttgccccatgtactttatgaagctccgctctggccttatgataaaaaaggaggcctgttactttaggagagaaaccaccaaaaggccttcactgaaaacaggtagaaagcacaaaagacatctggtactcgctgcctgtcaacagcagtctactgtggagtgctttgcctttggtatatcaggggtccagaaatatactagagcacttcatgattcaagtatcacaggaatttcacctattacagagtatcttgcttctctaagcacatacaatgatcaatccattacttttgctttggaggatgaaagttatgagatatatgttgaagacttgaaaaaagatgaaaagaaagataaggtgttactgagttactatgagtctcaacacccctcaaatgaatcaggtgacggtgttgatggtaagatgttaatggtaaccctgagtcctacaaaagacttctggttgcatgccaacaacaaggaacactctgtggagctccataagtgtgaaaaaccactgccagaccaggccttctttgtccttcataatatgcactccaactgtgtttcatttgaatgcaagactgatcctggagtgtttataggtgtaaaggataatcatcttgctctgattaaagtagactcttctgagaatttgtgtactgaaaatatcttgtttaagctctctgaaacttagttgatggaaacctgtgagtcttgggttgagtacccaaatgctaccactggagaaggaatgagagataaagaaagagacaggtgacatctaagggaaatgaagagtgcttagcatgtgtggaatgttttccatattatgtataaaaatattttttctaatcctccagttattcttttatttccctctgtataactgcatcttcaatacaagtatcagtatattaaatagggtattggtaaagaaacggtcaacattctaaagagatacagtctgacctttacttttctctagtttcagtccagaaagaacttcatatttagagctaaggccactgaggaaagagccatagcttaagtctctatgtagacagggatccattttaaagagctacttagagaaataattttccacagttccaaacgataggctcaaacactagagctgctagtaaaaagaagaccagatgcttcacagaattatcattttttcaactggaataaaacaccaggtttgtttgtagatgtcttaggcaacactcagagcagatctcccttactgtcaggggatatggaacttcaaaggcccacatggcaagccaggtaacataaatgtgtgaaaaagtaaagataactaaaaaatttagaaaaataaatccagtatttgtaaagtgaataacttcatttctaattgtttaatttttaaaattctgatttttatatattgagtttaagcaaggcattcttacacgaggaagtgaagtaaattttagttcagacataaaatttcacttattaggaatatgtaacatgctaaaacttttttttttttaaagagtactgagtcacaacatgttttagagcatccaagtaccatataatccaactatcatggtaaggccagaaatcttctaacctaccagagcctagatgagacaccgaattaacattaaaatttcagtaactgactgtccctcatgtccatggcctaccatcccttctgaccctggcttccagggacctatgtcttttaatactcactgtcacattgggcaaagttgcttctaatccttatttcccatgtgcacaagtctttttgtattccagcttcctgataacactgcttactgtggaatattcatttgacatctgtctcttttcatttcttttaactaccatgcccttgatatatcttttgcacctgctgaacttcatttctgtatcacctgacctctggatgccaaaacgtttattctgctttgtctgttgtagaattttagataaagctattaatggcaatatttttttgctaaacgtttttgttttttactgtcactagggcaataaaatttatactcaaccatataataacattttttaactacataaaggagtagtttttattttaaagtcttagcaatttctattacaacttttcttagacttaacacttatgataaatgactaacatagtaacagaatctttatgaaatatgaccttttctgaaaatacatacttttacatttctactttattgagacctattagatgtaagtgctagtagaatataagataaaagaggctgagaattaccatacaagggtattacaactgtaaaacaatttatctttgtttcattgttctgtcaataattgttaccaaagagataaaaataaaagcagaatgtatatcatcccatctgaaaaacactaattattgacatgtgcatctgtacaataaacttaaaatgattattaaataatcaaatatatctactacattgtttatattattgaataaagtatattttccaaatgt

SEQ ID NO: 553 - DNA, 1348 bp, Homo sapiens
tctggctactggtgacacactgctgtgcctgccctggccttctccagacagccctgtccacccaaagcccagccaccctggcctgcagcaggcctgtggagttctcagttgcgtggggaccagagggtgctggagaaacaaaccagacgcagctgaaggcagtcagggcagggcgcaatcagcgataagagctgcataggggccacagcgtaacctgagctccagtcggtggaaagaaaaggcagagacgttgcagaggccaggtctgctcaggggaagacagttctgggtgtagaggactcacatcccagagaggctgaggaagggtttaccacgcaagcttctcattcgggactcttgaggggtggctggggtcttcctggcgacgggctgcggcactgaagccctactggagtttggcctgtctccggcacaggtttggacggagctgttttgtgctgaaaggttttctcggggtccgtggtgtcccccaaaggtgccaccgtgcgggtctcctagctccctgccagcttcctgtccctgtgctcactgcccccacgcctcctgccaaggccgagccacacacccgctccacctgcatttcctctaccgactcgccagcccaaatgccgctcttcactctggcctcgctgagcggctgcccgaggaggagctctaggccgacgcccaccgcaggccttacagtcgtctctggacgctcccttgcagatgcaccgtggcctggcggcgagcccccggtcaccttcctccgcacggaagaggggccggacgccaccttccccaggaccattcccctgatccaacagttgctaaacgccacggagctcacgcaggacccggccgcctactcccagctggtggccgtgctggtctacaccgccgagcgggccaagttcgccaccggggtagagcggcaggactggatggagctgttcattgacacctttaagctggtgcacagggacatcgtgggggaccccgagaccgcgctggccctctgctaaagcccgggcacccgcccagccgggctgggccctccctgccacactagcttcccagggctgcccccgacaggctggctctcagtggaggccgagagatctggaatcggggtcagcggggctacagtccttccaggggctctggggcagctcccagcctcttcccatgctggtggccaccgtgtcccttgctgcggctgcatcttccagtctctcctccgtcttccagtggccgctctctttataagaaccctggtcattgaatttaaggcccaccccaagtccagaatgacctcgcaagacccttaactcactcccgtctgcag

SEQ ID NO: 554 - DNA, 2056 bp, Homo sapiens
cgcagcgcagcccagccgagcgtcgcggggccgccccccgccctgccggccgcctcgccgagcctcctggggcgcccgggcccgcgacccccgcacccagctccgcaggaccggcgggcgcgcgcgggctctggaggccacgggcatgatgcttcgggtcctggtgggggctgtcctccctgccatgctactggctgccccaccacccatcaacaagctggcactgttcccagataagagtgcctggtgcgaagccaagaacatcacccagatcgtgggccacagcggctgtgaggccaagtccatccagaacagggcgtgcctaggacagtgcttcagctacagcgtccccaacaccttcccacagtccacagagtccctggttcactgtgactcctgcatgccagcccagtccatgtgggagattgtgacgctggagtgcccgggccacgaggaggtgcccagggtggacaagctggtggagaagatcctgcactgtagctgccaggcctgcggcaaggagcctagtcacgaggggctgagcgtctatgtgcagggcgaggacgggccgggatcccagcccggcacccaccctcacccccatccccacccccatcctggcgggcagacccctgagcccgaggacccccctggggccccccacacagaggaagagggggctgaggactgaggcccccccaactcttcctcccctctcatccccctgtggaatgttgggtctcactctctggggaagtcaggggagaagctgaagcccccctttggcactggatggacttggcttcagactcggacttgaatgctgcccggttgccatggagatctgaaggggcggggttagagccaagctgcacaatttaatatattcaagagtggggggaggaagcagaggtcttcagggctctttttttggggggggtggtctcttcctgtctggcttctagagatgtgcctgtgggagggggaggaagttggctgagccattgagtgctgggggaggccatccaagatggcatgaatcgggctaaggtccctgggggtgcagatggtactgctgaggtcccgggcttagtgtgagcatcttgccagcctcaggcttgagggagggctgggctagaaagaccactggcagaaacaggaggctccggcccacaggtttccccaaggcctctcaccccacttcccatctccagggaagcgtcgccccagtggcactgaagtggccctccctcagcggaggggtttgggagtcaggcctgggcaggaccctgctgactcgtggcgcgggagctgggagccaggctctccgggcctttctctggcttccttggcttgcctggtgggggaaggggaggaggggaagaaggaaagggaagagtcttccaaggccagaaggagggggacaaccccccaagaccatccctgaagacgagcatccccctcctctccctgttagaaatgttagtgccccgcactgtgccccaagttctaggccccccagaaagctgccagagccggccgccttctcccctctcccagggatgctctttgtaaatatcggatgggtgtgggagtgaggggttacctccctcgccccaaggttccagaggccctaggcgggatgggctcgctgaacctcgaggaactccaggacgaggaggacatgggacttgcgtggacagtcagggttcacttgggctctctctagctccccaattctgcctgcctcctccctcccagctgcactttaaccctagaaggtggggacctggggggagggacagggcaggcgggcccatgaagaaagcccctcgttgcccagcactgtctgcgtctgctcttctgtgcccagggtggctgccagcccactgcctcctgcctggggtggcctggccctcctggctgttgcgacgcgggcttctggagcttgtcaccattggacagtctccctgatggaccctcagtcttctcatgaataaattccttcaacgccaaaaaaaaaaaaaaaaaaaaaaaaaaaaaaaaaaaaaaaaaa

SEQ ID NO: 555 - DNA, 329 bp, Homo sapiens
  misc_feature (246)..(246): n is a, c, g, or t
  misc_feature (292)..(292): n is a, c, g, or t
  misc_feature (307)..(307): n is a, c, g, or t
  misc_feature (316)..(316): n is a, c, g, or t
  misc_feature (322)..(322): n is a, c, g, or t
gaagtaaaagatttttattgttctatagacacttctgaaaagagatctaattgagaaaatatacaaagcatttaagagtttcatccccagagactgactgaaggcgttacagccctcctctccaaggctcagggctgagaacggttagcatatcgaatgatcagtaaaaacatgcaaaagtgagaaggaaagggaaaaaggtgcattcccctaagctgagggggatggaatttcagaacagaggangcagggtggacaagtaccaaggtggctctccctttccctctgtgtnatctttcaaaaccanttccaagcntggatnaaagcaa

SEQ ID NO: 556 - DNA, 2996 bp, Homo sapiens
aaaactcttctcagacccgggagcgtccgggacgcggagcccggagctggggcgacgaggcgattgcgggggcctgggctagctgctggctaccaatattctactttctgtctctatgtatgtgactaccctggttacctcatataatctccctggaaaaggagacatgaatgtctgcaatgatacttcctgacaagaagttgatacaagaaaaggaaaggagattaacagctagtgagcagaatttcgaacagcaggatttcgtattttttgcttccaactgcacacttccgtttcccacttttaaatcagagatacctacactcaaaacccagacaaggcaaaaggatacctttcttgtatattttttgagatcgaagaaacgacaatgtccaggaaacagaaccagaaggattcatcaggattcatttttgatttgcagtccaataccgtactggcccagggaggagcttttgagaacatgaaagagaagataaatgcggtacgtgcaatagttcctaataagagcaacaatgaaattatcctggttttgcagcactttgataactgtgtggacaaaacagtacaagcattcatggaaggtagtgccagtgaagtactcaaagaatggacagtaacaggcaagaaaaagaacaaaaagaagaaaaacaaaccgaaacctgccgcagaaccaagtaacggcatcccagattccagtaaatcagtttccattcaagaggaacagtctgcgccttcctcagagaaaggtggtatgaatggctaccatgtcaatggtgccatcaatgacactgagtctgtggactcactcagtgaaggtttggagacactttcaatagatgccagagaattggaggatcccgagtctgccatgctagatacgctggacagaacaggatccatgctgcagaatggtgtctctgattttgagaccaagtctttgactatgcactctattcacaattctcaacaacccaggaatgctgccaaatctctctcaagacctaccacagaaactcagttttcaaatatggggatggaagatgttcccctcgccaccagtaaaaagctaagttccaatattgaaaaatctgtaaaagacctccagcgctgcacagtgtctcttgcacggtatcgagttgtagttaaagaagagatggatgcctccattaagaaaatgaaacaagcctttgctgaattggagagctgtttaatggatcgagaagtggcgttgcttgctgaaatggacaaagtgaaagctgaagcaatggaaattttgctcagccgacaaaagaaggctgaacttctaaagaagatgactcatgtggctgttcaaatgtcagagcagcaattggttgagctcagagctgatatcaagcactttgttagtgaacgtaaatatgatgaggatctgggacgagtagcccggttcacctgtgatgtagagaccctaaagaagagcattgattcatttggacaagtgtctcatccaaagaacagctattcgaccagatcccgatgtagctcagttacatctgtgtccttgagtagcccaagtgatgcctctgctgcttcctcttccacctgtgcctctcctcccagccttacaagtgctaacaagaaaaactttgcaccgggagagactcctgcagccatagcaaactccagtggccagccctaccagccacttcgggaggtattgccagggaacagacgaggaggacagggctataggccacaaggccaaaagtccaatgaccccatgaaccaagggcggcatgacagtatgggtcgttacagaaacagctcgtggtattcatctggttccaggtatcagagtgctccatctcaggcaccaggaaacaccattgaaagaggccagactcactctgcagggaccaatggaactagagtcagcatggagcccagccctcccacgccttcattcaaaaaggggctcccccagcgcaaacccaggacctctcagactgaagccgtgaactcttgagagaaaatccagttggcctctctcctctatccacacaattcaacttgataactggactttaggaaacttacagttagatgtaataacaaaaagaagtttatgcgtatcactttttgtgccattctaagtatttttggttcttgtctccttatttcctctttaccatttttggaggggaagctattttttttccttgatctttcccagtgatatggattgaatctggttggtcatttccaccaggaatcagaggcagctgttaccaggtttcggccttccagttgatccctccactgtccaggctgtctcaggaggaggtgaatcagagctagtctgtcacctttccaatctaagccgaagccacaggtgcctgacaggttcccttctaacaactatttgaccaagagaggcaatcagggggttgtatactgcactggattcgccagagaagggaaaatttaattagtgaagaggaaagaacactaggaaacatttgagaacctgcctctatcccagaacgtgctggagatttgacactcaaatcagtgtttagtcttctgcttggcaccatagcttaacctgcagtttcttcaaaatgcccaatgccttgtttcctattaccttagattgcaaaccagtctagggaagtctatgagaaagtagcatttaattaaagtttaaaaaaaaaaaggttgggcgttgtggctcatgcctgtaatcccagcactttgggaggctgaggcgggtggatcactaggtcaggagttcaagaccagcctggccaacatggtgaaaccctgtctgtactaaaaatacaaaagttagctgagcatggtggcgtgtgcctgtaatctcagctactcaggaggctgaggcaggagaatcgcttgaacccaggaggcggaggctgcagtgagctgagattgtgccactgcactccagcctgggagacagagcaagactcagtctc

SEQ ID NO: 557 - DNA, 372 bp, Homo sapiens
agtcccagcgaacccgcgtgcaacctgtcccgactctagccgcctcttcagcacgccatggatcccaactgctcctgcgccgccggtgactcctgcacctgcgccggttcctgcaaatgcaaagagtgcaaatgcacttcgtgcaagaaaagctgctgctcctgctgccctgtgggctgtgccaagtgtgcccaaggctgcatctgcaaaggggcgtcggacaagtgcagctgctgcgcctgatgctgggacagccccgctcccagatgtaaagaacgcgacttccacaaacctggattttttatgtacaaccctgaccgtgaccgtttgctatattcctttttctatgaaataatgtgaatgataataaaa

SEQ ID NO: 558 - DNA, 2863 bp, Homo sapiens
gtgcggccagcgggcggaggcggtctcgcatcggcggcgacggagggctcaggcgtcgtcgtttgggtggggggccgctgaactgacaagcgacatttcagctcctttcacccgccggaaccccggagccggggcccgctcagccggcgttaccatgaccaaggccggtagcaagggcgggaacctccgcgacaagctggacggcaacgaactggacctgagcctcagcgacctgaatgaggtcccggtgaaggagctggctgcccttccaaaggccaccatcctggatctgtcttgtaataaactgactactctaccgtcggatttctgtggcctcacacacctggtgaagctagacctgagtaagaacaagctgcagcagctgccagcagactttggccgtctggtcaacctccagcacctggatctcctcaacaacaagctggtcaccttgcctgtcagctttgctcagctcaagaacctgaagtggttggacctgaaggataaccccctggatcctgtcctggccaaggtggcaggtgactgcttggatgagaagcagtgtaagcagtgtgcaaacaaggtgttacagcacatgaaggccgtgcaggcagatcaggagcgggagaggcagcggcggctggaagtagaacgtgaggcagagaagaagcgtgaggctaagcagcgagctaaggaagctcaggagcgggaactgcggaagcgggagaaggcggaagagaaggagcgccggagaaaggagtatgatgccctcaaagcagccaagcgggagcaggagaagaaacctaagaaggaagcaaatcaggccccgaaatctaagtctggctcccgtccccgcaagccaccaccccggaagcacactcgttcctgggctgtgctgaagctgctgctgctgctgctgctatttggtgtggcgggagggctggttgcttgtcgggtgacagagctgcagcagcagcccctctgcaccagcgtgaacaccatctatgacaatgcggtccagggtctacgccgccatgagatcctccagtgggtcctccagaccgactctcagcagtgagcttgtccccagcacctgctgcctcccagccttggagtttggattcctatggaattgggttctgctggacacaacctctttttagcatcagacctacctgccatcatcaaatggctgcagattggtacatgagacctcctctttgtaggacttcttcattccttagtcagggttccctgaaggaatgaggagaaatgggaggtggcgggggggcgtggggggcagttacctgcatgcctaaaggagtaggcttgggggtggggagagagaaaacatagccttttctagttgttatataaagctgtgtaaaggcaaggctcgtttctactaaatggtcagctgtcactacatttatacttttgtatgccacaaaccctttcattcctccctgggaatcagggtagatcaggaggaactgggggggactagaacaccacgctcagtaaatccagtctaaactgggaggtaggggtattcctgttttctttaggacctcagagatgtaagcattttagcagccacacaaaatctctggctatgaaagggacttcatgaccatccagtccaatataacacttgcagacagagaaactgaggtcttccatgacttgcctagtctcccagctagtttgaggcaaaactggattcccactctggtattctttcttccctttacatcattttccctcctttataatgtcctgagagaccagaactcacaccagaatcgattattcctcaggtgaagcatagactctttcatggtagacagatttcacgactcagagatagaaatctcttgctatcatcaggtcacgggcagctcctgtggagtcctgcccaacttatgtggcttccataaaatggcaacagtccaggctccttgcctaattttagagcattaactccctaattgccagtaagcaaggaggtggatctctgcaaacctacactgtctatgacagctctagttgtacttggtgtgactaaatacctcaaaggcaacctgcttctgcaggttttgaagtgtcagcttcataagacactgaggtttagaattgtttgattctagaccataactgaagggcataaatggaaacaggatatgaagggaaacaagtagcatcatggagctgaaaagtggtgcatcacccaatggctagcacagacaaggatcacactgtccattctcttgtctgctaaattaagcattttcttgcctcctttgcttcatcttttcacaacagctggatagagggatcagaaatgactgtgtcatggtgctcattcactgcaaactcccagttgcaagctccttggctcccccggagggagcaagaatctcatagttcagagacacagagggccttttagccctaatgaccttttggatgggactgcaactcatgactatcctgatattagaagaaaggactttgttaatcttctcccccatagctctgctgcgtaggtctacatcttactcagaatcactacacattcctttagtcttcctccaagctccagagccattggtacaaatgctttattgaaactaaatacataatacacacaatgagatgaagacaatatagaagtccgcatagtcatcataatcccgttccttggccggttgaggcagctcagtggctgagcccagtcaagccaacccgcagcttcactcacgacttcaagatttgatgctaattcttttggatttctacagttattaaataagtgtctgagtggaaaaaaaaaaaaaaaaaaaaaaaaaaaaaaaaaaaa

SEQ ID NO: 559 - DNA, 1576 bp, Homo sapiens
gaattcgagccgaccgaccgctcccggcccgccccctatgggccccggctagaggcgccgccgccgccggcccgcggagccccgatgctggcccggaggaagccggtgctgccggcgctcaccatcaaccctaccatcgccgagggcccatcccctaccagcgagggcgcctccgaggcaaacctggtggacctgcagaagaagctggaggagctggaacttgacgagcagcagaagaagcggctggaagcctttctcacccagaaagccaaggttggcgaactcaaagacgatgacttcgaaaggatctcagagctgggcgcgggcaacggcggggtggtcaccaaagtccagcacagaccctcgggcctcatcatggccaggaagctgatccaccttgagatcaagccggccatccggaaccagatcatccgcgagctgcaggtcctgcacgaatgcaactcgccgtacatcgtgggcttctacggggccttctacagtgacggggagatcagcatttgcatggaacacatggacggcggctccctggaccaggtgctgaaagaggccaagaggattcccgaggagatcctggggaaagtcagcatcgcggttctccggggcttggcgtacctccgagagaagcaccagatcatgcaccgagatgtgaagccctccaacatcctcgtgaactctagaggggagatcaagctgtgtgacttcggggtgagcggccagctcatagactccatggccaactccttcgtgggcacgcgctcctacatggctccggagcggttgcagggcacacattactcggtgcagtcggacatctggagcatgggcctgtccctggtggagctggccgtcggaaggtaccccatccccccgcccgacgccaaagagctggaggccatctttggccggcccgtggtcgacggggaagaaggagagcctcacagcatctcgcctcggccgaggccccccgggcgccccgtcagcggtcacgggatggatagccggcctgccatggccatctttgaactcctggactatattgtgaacgagccacctcctaagctgcccaacggtgtgttcacccccgacttccaggagtttgtcaataaatgcctcatcaagaacccagcggagcgggcggacctgaagatgctcacaaaccacaccttcatcaagcggtccgaggtggaagaagtggattttgccggctggttgtgtaaaaccctgcggctgaaccagcccggcacacccacgcgcaccgccgtgtgacagtggccgggctccctgcgtcccgctggtgacctgcccaccgtccctgtccatgccccgcccttccagctgaggacacgtggcgcctccacccaccctcctgcctcaccctgcggagagcaccgtggcggggcgacagcgcatgcaggaacgggggtctcctctcctgccagtcctggccggggtgcctctggggacgggcgacgctgctgtgtgtggtctcagaggctctgcttccttaggttacaaaacaaaacagggagagaaaagcaaaaaaaaaaaaaaaaaa

SEQ ID NO: 560 - DNA, 1973 bp, Homo sapiens
gggatattggagtagcaagaggctgggaagccatcacttaccttgcactgagaaagaagacaaaggccagtatgcacagctttcctccactgctgctgctgctgttctggggtgtggtgtctcacagcttcccagcgactctagaaacacaagagcaagatgtggacttagtccagaaatacctggaaaaatactacaacctgaagaatgatgggaggcaagttgaaaagcggagaaatagtggcccagtggttgaaaaattgaagcaaatgcaggaattctttgggctgaaagtgactgggaaaccagatgctgaaaccctgaaggtgatgaagcagcccagatgtggagtgcctgatgtggctcagtttgtcctcactgaggggaaccctcgctgggagcaaacacatctgacctacaggattgaaaattacacgccagatttgccaagagcagatgtggaccatgccattgagaaagccttccaactctggagtaatgtcacacctctgacattcaccaaggtctctgagggtcaagcagacatcatgatatcttttgtcaggggagatcatcgggacaactctccttttgatggacctggaggaaatcttgctcatgcttttcaaccaggcccaggtattggaggggatgctcattttgatgaagatgaaaggtggaccaacaatttcagagagtacaacttacatcgtgttgcggctcatgaactcggccattctcttggactctcccattctactgatatcggggctttgatgtaccctagctacaccttcagtggtgatgttcagctagctcaggatgacattgatggcatccaagccatatatggacgttcccaaaatcctgtccagcccatcggcccacaaaccccaaaagcgtgtgacagtaagctaacctttgatgctataactacgattcggggagaagtgatgttctttaaagacagattctacatgcgcacaaatcccttctacccggaagttgagctcaatttcatttctgttttctggccacaactgccaaatgggcttgaagctgcttacgaatttgccgacagagatgaagtccggtttttcaaagggaataagtactgggctgttcagggacagaatgtgctacacggataccccaaggacatctacagctcctttggcttccctagaactgtgaagcatatcgatgctgctctttctgaggaaaacactggaaaaacctacttctttgttgctaacaaatactggaggtatgatgaatataaacgatctatggatccaggttatcccaaaatgatagcacatgactttcctggaattggccacaaagttgatgcagttttcatgaaagatggatttttctatttctttcatggaacaagacaatacaaatttgatcctaaaacgaagagaattttgactctccagaaagctaatagctggttcaactgcaggaaaaattgaacattactaatttgaatggaaaacacatggtgtgagtccaaagaaggtgttttcctgaagaactgtctattttctcagtcatttttaacctctagagtcactgatacacagaatataatcttatttatacctcagtttgcatatttttttactatttagaatgtagccctttttgtactgatataatttagttccacaaatggtgggtacaaaaagtcaagtttgtggcttatggattcatataggccagagttgcaaagatcttttccagagtatgcaactctgacgttgatcccagagagcagcttcagtgacaaacatatcctttcaagacagaaagagacaggagacatgagtctttgccggaggaaaagcagctcaagaacacatgtgcagtcactggtgtcaccctggataggcaagggataactcttctaacacaaaataagtgttttatgtttggaataaagtcaaccttgtttctactgtttt

SEQ ID NO: 561 - DNA, 130 bp, Homo sapiens
tgaggggcggagaggcctggcgggccgctgctgcgggccaggggacgggggcggagccggagccggagccgacgggcggtggccgcactgggaccccggaatcccgcgcgctgcccacgattcgcttctg

SEQ ID NO: 562 - DNA, 1794 bp, Homo sapiens
cccgcgccctccgttcgctccggacaccatggacaagttttggtggcacgcagcctggggactctgcctcgtgccgctgagcctggcgcagatcgatttgaatataacctgccgctttgcaggtgtattccacgtggagaaaaatggtcgctacagcatctctcggacggaggccgctgacctctgcaaggctttcaatagcaccttgcccacaatggcccagatggagaaagctctgagcatcggatttgagacctgcaggtatgggttcatagaagggcatgtggtgattccccggatccaccccaactccatctgtgcagcaaacaacacaggggtgtacatcctcacatacaacacctcccagtatgacacatattgcttcaatgcttcagctccacctgaagaagattgtacatcagtcacagacctgcccaatgcctttgatggaccaattaccataactattgttaaccgtgatggcacccgctatgtccagaaaggagaatacagaacgaatcctgaagacatctaccccagcaaccctactgatgatgacgtgagcagcggctcctccagtgaaaggagcagcacttcaggaggttacatcttttacaccttttctactgtacaccccatcccagacgaagacagtccctggatcaccgacagcacagacagaatccctgctaccagagaccaagacacattccaccccagtggggggtcccataccactcatggatctgaatcagatggacactcacatgggagtcaagaaggtggagcaaacacaacctctggtcctataaggacaccccaaattccagaatggctgatcatcttggcatccctcttggccttggctttgattcttgcagtttgcattgcagtcaacagtcgaagaaggtgtgggcagaagaaaaagctagtgatcaacagtggcaatggagctgtggaggacagaaagccaagtggactcaacggagaggccagcaagtctcaggaaatggtgcatttggtgaacaaggagtcgtcagaaactccagaccagtttatgacagctgatgagacaaggaacctgcagaatgtggacatgaagattggggtgtaacacctacaccattatcttggaaagaaacaaccgttggaaacataaccattacagggagctgggacacttaacagatgcaatgtgctactgattgtttcattgcgaatcttttttagcataaaattttctactctttttgttttttgtgttttgttctttaaagtcaggtccaatttgtaaaaacagcattgctttgtaaattagggcccaattaataatcagcaagaatttgatcgttcagttccacttggaggccttcatcctcgggtgtgctatggatggcttctaacaaaaactacacatatgtattcctgatcgccaacctttcccccaccagctaaggacatttcccagggttaatagggcctggtccctgggaggaaatttgaatgggtccattttgcccttccatagcctaatccctgggcattgctttccactgaggttggggtgtactagttacacatcttcaacagaccccctctagaaatttttcagatgcttctgggagacaccaaagggtgaagctatttatctgtagtaaactatttatctgtgtttttgaaatattaaaccctggatcagtcctttgatcagtataattttttaaagttactttgtcagaggcacaaaagggtttaaactgattcataataaatatctgtacttcttcgatcttc

SEQ ID NO: 563 - DNA, 2855 bp, Homo sapiens
gaggaggggaggcctcctccgccgccgccatcttggaccgggcccggtcagcttccgcggagccatcggcagacgccgcggcctcccttgagccccgacccccgtcgtcagaacaaccccgggcccactcccccaaccccacttccgcttcgcgccgctatcgcgatagcgcccgggcccggggcgcgagaaaaaggcggcgggcgctcgcctcccccgcctgtcgcgatacgctcctcagcggcggcgccagctcctgtgcgtccgtctccaagagagtatgaagagagtgcgtctgtagggcagggaagatggcggacaagcgcaaactccaaggtgagattgatcgctgcctcaagaaggtgtccgagggcgtggagcagtttgaagatatttggcagaagctccacaatgcagccaacgcgaaccagaaagaaaagtatgaggctgacctaaagaaggagattaagaagctacaacggctgagggaccaaatcaagacatgggtagcgtccaacgagatcaaggacaagaggcagcttatagacaaccgcaagctcattgagacgcaaatggaacggttcaaagttgtggaacgagagaccaaaaccaaagcttacagcaaagagggcctgggcctggcccagaaggtagatcctgcccagaaggagaaggaagaggttggccagtggctcacgaataccatcgacacgctcaacatgcaggtggaccagtttgagagtgaagtggagtcactgtcagtgcagacacgcaagaagaagggcgacaaggataagcaggaccggattgagggcttgaagcggcacatcgagaagcaccgctaccacgtgcgcatgctagagaccatcctgcgcatgctggacaatgactccatcctcgttgacgccatccgcaagatcaaggacgacgttgagtactatgttgactcatcccaggaccccgacttcgaggagaacgagtttctctacgatgacctggacctcgaggacattccacaggcgctggtcgccacctccccccccagccacagccacatggaggatgagatcttcaaccagtccagcagcacgcccacctcaaccacctccagctctcccatcccgcccagcccagccaactgtaccacggaaaactctgaagatgataagaagaggggacgttccacagacagtgaagtcagccagtctccagccaaaaacggctccaagcctgtccacagcaaccagcaccctcagtccccagctgtgccgcccacctacccctccggccccccgcctgctgcctctgccttgagcaccactcctggcaacaatggggtccccgcccccgcagcacccccaagtgccctgggccccaaggccagtccagctcccagccacaactcgggcacccctgctccctatgcccaggctgtggccccaccagctcccagtgggcccagcacgacccagccccggccccccagcgtccagcctagcggaggcggaggcggcggcagcggaggtggagggagcagcagcagtagtaacagcagtgccggtggaggggctggcaagcagaatggcgccaccagttacagctcagttgtggcagacagcccggcagaggtggctttgagcagcagtgggggcaacaatgccagcagccaggccttgggccccccttccggcccccacaacccacctcccagcacctcgaaggaacccagtgcggcagccccaacgggggctgggggcgtggccccaggctcagggaacaactcagggggacccagcctcctggtgccactgcctgtgaatcctcccagctccccaacgcccagcttcagtgatgccaaggcagccggtgccctgctcaatgggcctccacagttcagcaccgccccagaaatcaaggcccctgagcctctgagctccttgaagtccatggcggaacgggcagccatcagctctggcattgaggaccctgtgccaacgctgcacctgaccgagcgagacatcatcctgagcagtacatcagcacctccggcctcagcccagccgcccctgcagctgtcagaggtgaacataccgctgtcgctgggtgtctgtccactgggccctgtgcccctcaccaaggagcagctctatcagcaggccatggaagaggccgcctggcaccacatgcctcacccctctgactctgagcgtattcggcagtacctcccccggaacccctgtccgacgcccccctaccaccaccagatgccacccccacactcggacactgtggaattctaccagcgcctgtcgaccgagacactcttcttcatcttctactatctggagggcactaaggcacagtatctggcagccaaggccctaaagaagcagtcatggcgattccacaccaagtacatgatgtggttccagaggcacgaggagcccaagaccatcactgacgagtttgagcagggcacctacatctactttgactacgagaagtggggccagcggaagaaggaaggcttcacctttgagtaccgctacctggaggaccgggacctccagtgacaccggcccctccctctacccacccccttcccccgcatgctgatccccctgcccaggtgagggccctgccctggaagactggagggaggccccaagccacggggcatccccctctcccaggaagcagggagggggccgggaggttttcctctcagccccaccctgggggcccgggggcgagggctgccccctcctcccctccccagtgagggacattttttggtaaacctattttcattttggaaaatatttatgaataaatagttttatatgacggctggc

SEQ ID NO: 564 - DNA, 475 bp, Homo sapiens
  misc_feature (394)..(394): n is a, c, g, or t
  misc_feature (402)..(402): n is a, c, g, or t
  misc_feature (432)..(432): n is a, c, g, or t
  misc_feature (439)..(439): n is a, c, g, or t
  misc_feature (446)..(446): n is a, c, g, or t
  misc_feature (465)..(465): n is a, c, g, or t
ggcagccatgacctgcagggcccagagacactgtccttcccctcatccacccaaggccccagccagcgctcataccctgtcctttctccctgaccccaagggcacagaggcaaggcctcctgtctacagcagcttcctcagtttcctactgccttaggaggcccctgcttgtgctcagggaaggcctcttcatgggcatgttcctgctggggcggtgcggtttggtcccaactctgctaagttttctgagatgagggtctagccctgttggggacagaaaagtgtgtagaccttcttcctgctagggctgcactgtcctggggtgttgggcccttctggtggacaaggctgtgcaaaccctgtacagaatcgagtgctgtagcctgggccagancccagagnccttgtgccatgtttttttttctggggcanaatgatnggggttncagccattggggaaggaanccaattcttt

SEQ ID NO: 565 - DNA, 1869 bp, Homo sapiens
ctgacacatgggctcctgctcctgaccaaactgagcaagaccagaatagactgtcacagaactctgtaaatctgtctcccagcagtcacgcaaacaacttatcagtagtgacttacagtaaggggctccatgggccttaccccttcggccagtcttaaacgggtgtcagcaagaagaaaaattaacaaaagacagaaggcctgactttggggggttagggcaaggggttcctctggattgcagaccacatcgcacagacccctggctctgaccccctctcatcccggaagaagaggaagaagcagaacagactagttttgagtaaactcagtatgcatgtgtgaatgctgaatcacaggaatggtgttgaggctaccaagaagaaatccatgcagccactttgggttttgttataggcatcagtctaacaagtcattaggtcactcgggaagggggaaaaagtttaaaatgggggaaaaaaagccatctttttaaacaaaaattattttgcctacagaaaggttgtagttttgagcacatgttaatttttttccctctttccccacttttatttttttaaataagggataacatattctttatagaatagtgcttgttctggaagagattcaggtgaaaagttggcgtggcatgtttgaggactctgcggatcagtgctacaggagtacatctgccctgccacatgactccagaagtctctgaccccatttgtttttaatggcatcagccaatgagttatcacccttttcctcctcttttctctttaatcttctgttgatttacacctttgacatttgtattcgtcaaccctgtggcttgttagcatcagaacctctctgaagaccaaacttccctgtgtggccagcagaggaagccttgaggatagatctcgggtgacgtgggattttctaagcctgagaggtgtccttctgcacacccttgtaacaattaaaattgcttttcttccatgtttctcttggcagagagaaatgccatcatgcttactgctcttttggattcttcatgcagtggcttcccatttgctctgggaacagtgcctctgtgctggttatatgtatgcaccacatgtgcacacacgggtgtcggtgcaactcaccagcaggtgtgcagtaggcaagcttgaaggtggcccatgcttctctgttgtcacacaacacctttccctgtttctcttcagttgtcctctgatattttcacagcctgttagtggcggctgatctgtagaggtatgaaaatacagccccaaagggggaatttgtcatggggaagggccagccactgactacttgatcttggagaccacatttagatggaaatgagaggacctccacagccccgcctccctgccaggatgctagattattggctgggaggtgggcaagtggcagcccagctgaagcaagaggctgattgactggctgctcactcaggcaggtggcctgccctggcatcctgtagattctgagcaggttgagatgtggatatctccatgggaagcttgaaccaggctagaacagctgtctgccaaagatacaagaatatgcaaagtccctcttacccccctccttccctcaagtcttagttggtttgagagccagggatatggatccagggtgctgttgcagggtcacctgcctgttaccacacccccatccagctgggtggtgggtgagggtgtgagacaggcagggagaccaggtaatgagtggctgcaaggagtcatatagcctgggtgtgggtgagggtctgcctgcctgtttctgtctgggtgtctgagttccaaaaaatgtgtgttgtttgttcctcctcaaaaaaaaaaaaaaaaaa

SEQ ID NO: 566 - DNA, 2053 bp, Homo sapiens
tgtcttcatgcttgttgcttcagtaacaaaatagctgctgaggctgcaggcatcacaccacattcaaggcaagaaaaaggaagaagtgagaatggtgccagccacatcatcttctcttaccaggaaaggcaaaagtcttcctagatctcccagcaggtttctgcttatatgtcatttgctagaactgtgtgccatgaacaccctggatacaagcaaaaacctggaaaagcacatattttgcctgggtctgggctcattgccatcctgagagaaagcagacttctggtagcaaagaaggtggaaataggtattgggaaggaagctaacggtgtctgctacaacacagcttaataaatagtagttttatatgcataataaatagtagctactccttggcataaagtaaaaataatgataacaaaaatacttacataattatattgtgtaagtgcttactatgtgccaggaactgttctgaatgttttaaatatgttaactcatttaatcttcacagcaattttgtgaggtaaatgttactatccttggtttttttttttttcagtgtttttaattctactttatatacatacaattagattgatcataatccctggttcatgacataccctcattggtccatgcatggctctcttttgtttactttttaaatattagttattgtaaataatatatagacaccttcaaatcccctgtccaaaataaaattagtgtctggtcagcaatttgcatctggctgtatggtacccccaacacattttacttcctcccctggccaaggtgatcatcatccagaattctgagctcattatccttcactttgcttttcatacagttttagagttttcttgcatctatataaagtcctaaaaatatgtgtgtgtagtgtgtgtgtatatatatagagaaagatggttgtttttaactgtatgtctttagtacttttttcacttgatattacattgttaagattctaccatattgttgtatgttgctacagttgttccttttgactcctgtttaacactcccattgtgcaaatatgtagcagtttattcatcctgaaaccattctttactgaagtgcctataacattcttattgattttctcttttctggttattaactggtctaattctgttacattcaagctttgcatatgattctagcagttttccaatatcctttttaatgtctgcatgaagtcctgaatcttctgcaagacttgcaataatttcttgcaaacgacttgccttgtgttgtgtgttgtcagatatttacattgggctaccagagagaggctgaccaataaagattttgacttgatggggtcttggtgcacacagagggcccttcatttcagcaaggaggaatgttgcaggactgagggaggcagagaatgtcaattcacttgtgaatattttcttgtcatgatgacttttgtttccctgggcaacctggcaaatgcgggaactttgattgtgaacactcagatactcagaagtccctacatcttggcaaattctttaacacttctcccacaaaaggtagaatctaattcctctccccttgaatatggccttggtgactcacttctaaagaatagtgtccaggaaacgtgttgctatgggacttctgaggctagaataagaaaaggtgatacagcttccatctggcttgctctttttgggacactcattctggagaagccagtcatcaggctgtgaaggagcccaaaggagcccacacagagagaccatggagaagcccacatggatgggcactgaggcctccaactgacagccaagagcaatcgccaggcatctgagtgagtctcctaggagaggctacaaagtttgaggagaagtagcaagtcatcctggacatgccctgtctaaattccccacaatgtacaaaattaagctaactgtgctctgtctgaaggcctcacccacagaatccattcacataataaatggttatcttatgctactaagttttggggtaatttgttatagaaattaataaaattagt

SEQ ID NO: 567 - DNA, 312 bp, Homo sapiens
  misc_feature (177)..(177): n is a, c, g, or t
  misc_feature (239)..(239): n is a, c, g, or t
gcgcgacgagtccaacttcagcgatgcactgctggatgccggcgagcccatgaagcacctggcagaggtgaaggactccctggacatagaggtcaagcataacttcattgaccccctccagaacctatgtgagaaagacctgaaggagatccagcaccacctgcagaagctggaggnccgccgcctggactttgactaaaagaagcggcagggcaagatccccgaagaggagctgcacnaggcgctggagaagtttgaggagtccaaggaggtggcagaaaccagcatgcacaacctcctggagaccgacat

SEQ ID NO: 568 - DNA, 2589 bp, Homo sapiens
caaggagcctgcacactgatggaggaggtacagccgtggaggagaaccagagtctggaggggaggcacagtcctcaggagcccccaggctgacaggggaaacaaaacacacaataaaccccaaacttgcaaggttctggggcaggcaccgaggtccgagtggcaaggagacaggatccagccctgtgcagtggtgaggaggcccctggggctgctgtgatcggcctggaatgtcaggctgtgagctcagccctctcggcctgcgtgtcgggctgtcagcagggccggtgcacgggagaagatttccagccccctctgggccatggacaggcctaaatttagctagtagacaaggggctggccccaagcccagggacagtcggccttataaagcggccgcagtcggagcctggcacgctcgcccagaggcctgcgcccacaccctctcctgtccagccttcgcccgcctgggcagggcccggcgccgtccgtggatgagccacagaacctcttccaccttccgagcggagagaagtttccattcctcttcttcttcctcctcctcttccacctcctcctcggcctcccgtgccctcccggcccaggacccgcccatggagaaggccctgagcatgttttccgatgactttggcagcttcatgcggccccactcggagcccctggccttcccagcccgccccggtggggcaggcaacatcaagaccctaggagacgcctatgagtttgcggtggacgtgagagacttctcacctgaagacatcattgtcaccacctccaacaaccacatcgaggtgcgggctgagaagctggcggctgacggcaccgtcatgaacaccttcgctcacaagtgccagctgccggaggacgtggacccgacgtcggtgacctcggctctgcgggaggacggcagcctcactatccgggcacggcgtcacccgcatacagaacacgtccagcagaccttccggacggagatcaaaatctgagtgcctctcccttccctttccctgtccccccgccccacgcctgccagcaaagcctcgctaaccccattacaacagctccaggacatctcagcccaggttctagcccccacgcaccccagaccccaggtggaccatcctcccaaactagggccctccactctatccagggcaggccagggactccctggcctgacacatgatgcccagatttcagatttggcctccgtcacttaatccagagtacaggggctggggtcagggaaggaagatctaaagaacccactgtgggtcaggggaatgggaccagcaggacatatgggcaagctctgcaggacagacaggcagacaaaccctctgatctatgaagtctctgcagggcaaggggaccagggacctggaaccctcttggccaaggggagtgggaacgacagagggaaggtcacaggcaagggtgcctatctaagtggaactaattgcccgagggctcagcaaggccaagaggagacagccgtgacggtaaacttcccctctaccagcctccaagccccacgccagcgagcaggctgcctgcccaccccgtgcccccagccagctggctgtgccagggcagagccatgccacatctgtatatagatggggtttttccaatacagctggttcgtgataaactgcatgaaactcctgccgtcctgcgcctgctggggcctccaggcaaggccacgtggggttgggggtggggctggtccttctccctcccacaggcctgtgttcttggggctgctcccatgcagacaggatcacctaacagagatggaagccagggcatggatggggctttgggtcctcgaggttggaccccagcttcttgccaccttcccctccgggcagtcagctctccatccatccccctctttaatctatgaatctataggctcggtgtgtgtaacacacacacccctatcgttgtccttcaaatactcagcattaccattggttgaggccaaattcagagctttctcaaatcagatttacaatctccattttcattaacggggaaacatccccgagccactgagtgctgtgctttgtcactgaaggttagatctgaacccagggtgtcaacagctgctctcaactccccacctctgggcactgaggagtatttcccctcattctacctctctaaggctatgcacccctccccacgtcttccagctgggggatggggggagtcataggaaaagcccccatctcccatctgggatagggaccttccatcagccttaaccctgggaaatgcctgctgcccccagtgactcttggtttcgtctcccacatacagaagcagggtggaggggaagggtgggtctcagttagcaggggtccccagggcaagtcagcctcctccctccatgcctctctggtcagtgtgccttagggtggcctctcactcccaccactctgggccccttgggggaggactggggagggggccgtgggagagccctgacgctggaacctgtatacacaataaaggacagtctcacagaaaaaaaaaaaaaaaaaaaaaaaaaaaaaaaaaa

SEQ ID NO: 569 - DNA, 426 bp, Homo sapiens
caactgttataggttgttggataaatcagtggttatttagggaactgcttgacgtaggaacggtaaatttctgtgggagaattcttacatgttttctttgctttaagtgtaactggcagttttccattggtttacctgtgaaatagttcaaagccaagtttatatacaattatatcagtcctctttcaaaggtagccatcatggatctggtagggggaaaatgtgtattttattacatctttcacattggctatttaaagacaaagacaaattctgtttcttgagaagagaatattagctttactgtttgttatggcttaatgacactagctaatatcaatagaaggatgtacatttccaaattcacaagttgtgtttgatatccaaagctgaatacattctgctttcatcttggtcacatacaat

SEQ ID NO: 570 - DNA, 1497 bp, Homo sapiens
accaacctcttcgaggcacaaggcacaacaggctgctctgggattctcttcagccaatcttcattgctcaagtgtctgaagcagccatggcagaagtacctgagctcgccagtgaaatgatggcttattacagtggcaatgaggatgacttgttctttgaagctgatggccctaaacagatgaagtgctccttccaggacctggacctctgccctctggatggcggcatccagctacgaatctccgaccaccactacagcaagggcttcaggcaggccgcgtcagttgttgtggccatggacaagctgaggaagatgctggttccctgcccacagaccttccaggagaatgacctgagcaccttctttcccttcatctttgaagaagaacctatcttcttcgacacatgggataacgaggcttatgtgcacgatgcacctgtacgatcactgaactgcacgctccgggactcacagcaaaaaagcttggtgatgtctggtccatatgaactgaaagctctccacctccagggacaggatatggagcaacaagtggtgttctccatgtcctttgtacaaggagaagaaagtaatgacaaaatacctgtggccttgggcctcaaggaaaagaatctgtacctgtcctgcgtgttgaaagatgataagcccactctacagctggagagtgtagatcccaaaaattacccaaagaagaagatggaaaagcgatttgtcttcaacaagatagaaatcaataacaagctggaatttgagtctgcccagttccccaactggtacatcagcacctctcaagcagaaaacatgcccgtcttcctgggagggaccaaaggcggccaggatataactgacttcaccatgcaatttgtgtcttcctaaagagagctgtacccagagagtcctgtgctgaatgtggactcaatccctagggctggcagaaagggaacagaaaggtttttgagtacggctatagcctggactttcctgttgtctacaccaatgcccaactgcctgccttagggtagtgctaagaggatctcctgtccatcagccaggacagtcagctctctcctttcagggccaatccccagcccttttgttgagccaggcctctctcacctctcctactcacttaaagcccgcctgacagaaaccacggccacatttggttctaagaaaccctctgtcattcgctcccacattctgatgagcaaccgcttccctatttatttatttatttgtttgtttgttttattcattggtctaatttattcaaagggggcaagaagtagcagtgtctgtaaaagagcctagtttttaatagctatggaatcaattcaatttggactggtgtgctctctttaaatcaagtcctttaattaagactgaaaatatataagctcagattatttaaatgggaatatttataaatgagcaaatatcatactgttcaatggttctgaaataaacttctctgaag

SEQ ID NO: 571 - DNA, 303 bp, Homo sapiens
gtagctgaagtctgggttagtgggaccattttcataaggaatgttttgctttgcaaaaagcaaaacccaggcaagttctgcttgctgagctgtgggataccgacctttttggctgtcttgggccgctacgtccctgggcttctgctgtcctacttgatgcttgtcactgtcatgatgtggccccttgctgtgtaccaccgactgtgggatcgagcatatgtgcggctgaagccagctctgcagcggctagacttcagtgtccgtggctacatgatgtccaagcagagagagagacaattacgc

SEQ ID NO: 572 - DNA, 602 bp, Homo sapiens
agctccaccctgggagggactgtggcccaggtactgcccgggtgctactttatgggcagcagctcagttgagttagagtctggaagacctcagaagacctcctgtcctatgaggccctccccatggctttagagacgatctgccgaccctctgggagaaaatccagcaagatgcaagccttcagaatctgggatgttaaccagaagaccttctatctgaggaacaaccaactagttgctggatacttgcaaggaccaaatgtcaatttagaagaaaagatagatgtggtacccattgagcctcatgctctgttcttgggaatccatggagggaagatgtgcctgtcctgtgtcaagtctggtgatgagaccagactccagctggaggcagttaacatcactgacctgagcgagaacagaaagcaggacaagcgcttcgccttcatccgctcagacagtggccccaccaccagttttgagtctgccgcctgccccggttggttcctctgcacagcgatggaagctgaccagcccgtcagcctcaccaatatgcctgacgaaggcgtcatggtcaccaaattctacttccaggaggacgagtag

SEQ ID NO: 573 - DNA, 3810 bp, Homo sapiens
gcggcggccgccttcggggaagggggtgggtccggggaggggtttgccatcctcctctagttaaaagtaagggggaaaagagtaaacgcgcgactccagcgcgcggctacctacgcttggtgcttgctttctccagccatcggagaccagagccgccccctctgctcgagaaaggggctcagcggcggcggaagcggagggggaccaccgtggagagcgcggtcccagcccggccactgcggatccctgaaaccaaaaagctcctgctgcttctgtaccccgcctgtccctcccagctgcgcagggccccttcgtgggatcatcagcccgaagacagggatggagaggcctctgtgctcccacctctgcagctgcctggctatgctggccctcctgtcccccctgagcctggcacagtatgacagctggccccattaccccgagtacttccagcaaccggctcctgagtatcaccagccccaggcccccgccaacgtggccaagattcagctgcgcctggctgggcagaagaggaagcacagcgagggccgggtggaggtgtactatgatggccagtggggcaccgtgtgcgatgacgacttctccatccacgctgcccacgtcgtctgccgggagctgggctacgtggaggccaagtcctggactgccagctcctcctacggcaagggagaagggcccatctggttagacaatctccactgtactggcaacgaggcgacccttgcagcatgcacctccaatggctggggcgtcactgactgcaagcacacggaggatgtcggtgtggtgtgcagcgacaaaaggattcctgggttcaaatttgacaattcgttgatcaaccagatagagaacctgaatatccaggtggaggacattcggattcgagccatcctctcaacctaccgcaagcgcaccccagtgatggagggctacgtggaggtgaaggagggcaagacctggaagcagatctgtgacaagcactggacggccaagaattcccgcgtggtctgcggcatgtttggcttccctggggagaggacatacaataccaaagtgtacaaaatgtttgcctcacggaggaagcagcgctactggccattctccatggactgcaccggcacagaggcccacatctccagctgcaagctgggcccccaggtgtcactggaccccatgaagaatgtcacctgcgagaatgggctaccggccgtggtgagttgtgtgcctgggcaggtcttcagccctgacggaccctcaagattccggaaagcgtacaagccagagcaacccctggtgcgactgagaggcggtgcctacatcggggagggccgcgtggaggtgctcaaaaatggagaatgggggaccgtctgcgacgacaagtgggacctggtgtcggccagtgtggtctgcagagagctgggctttgggagtgccaaagaggcagtcactggctcccgactggggcaagggatcggacccatccacctcaacgagatccagtgcacaggcaatgagaagtccattatagactgcaagttcaatgccgagtctcagggctgcaaccacgaggaggatgctggtgtgagatgcaacacccctgccatgggcttgcagaagaagctgcgcctgaacggcggccgcaatccctacgagggccgagtggaggtgctggtggagagaaacgggtcccttgtgtgggggatggtgtgtggccaaaactggggcatcgtggaggccatggtggtctgccgccagctgggcctgggattcgccagcaacgccttccaggagacctggtattggcacggagatgtcaacagcaacaaagtggtcatgagtggagtgaagtgctcgggaacggagctgtccctggcgcactgccgccacgacggggaggacgtggcctgcccccagggcggagtgcagtacggggccggagttgcctgctcagaaaccgcccctgacctggtcctcaatgcggagatggtgcagcagaccacctacctggaggaccggcccatgttcatgctgcagtgtgccatggaggagaactgcctctcggcctcagccgcgcagaccgaccccaccacgggctaccgccggctcctgcgcttctcctcccagatccacaacaatggccagtccgacttccggcccaagaacggccgccacgcgtggatctggcacgactgtcacaggcactaccacagcatggaggtgttcacccactatgacctgctgaacctcaatggcaccaaggtggcagagggccacaaggccagcttctgcttggaggacacagaatgtgaaggagacatccagaagaattacgagtgtgccaacttcggcgatcagggcatcaccatgggctgctgggacatgtaccgccatgacatcgactgccagtgggttgacatcactgacgtgccccctggagactacctgttccaggttgttattaaccccaacttcgaggttgcagaatccgattactccaacaacatcatgaaatgcaggagccgctatgacggccaccgcatctggatgtacaactgccacataggtggttccttcagcgaagagacggaaaaaaagtttgagcacttcagcgggctcttaaacaaccagctgtccccgcagtaaagaagcctgcgtggtcaactcctgtcttcaggccacaccacatcttccatgggacttccccccaacaactgagtctgaacgaatgccacgtgccctcacccagcccggcccccaccctgtccagacccctacagctgtgtctaagctcaggaggaaagggaccctcccatcattcatggggggctgctacctgacccttggggcctgagaaggccttgcgggggtggggtttgtccacagagctgctggagcagcaccaagagccagtcttgaccgggatgaggcccacagacaggttgtcatcagcttgtcccattcaagccaccgagctcaccacagacacagtggagccgcgctcttctccagtgacacgtggacaaatgcgggctcatcagcccccccagagagggtcaggccgaaccccatttctcctcctcttaggtcattttcagcaaacttgaatatctagacctctcttccaatgaaaccctccagtctattatagtcacatagataatggtgccacgtgttttctgatttggtgagctcagacttggtgcttccctatccacagcccccaccccttgtttttcaagatactattattatattttcacagacttttgaagcacaaatttattggcatttaatattggacatctgggcccttggaagtacaaatctaaggaaaaaccaacccactgtgtaagtgactcatcttcctgttgttccaattctgtgggtttttgattcaacggtgctataaccagggtcctgggtgacagggcgctcactgagcaccatgtgtcatcacagacacttacacatacttgaaacttggaataaaagaaagatttatgaaacgtgtctgtgtttcctttgacccacagcacctgggccctgagcagcaggcttcctatgttcagtggccagaagcagagcttcaggtacattcgtggttttctccggtggacatgggtcctcagatcccctccagcccagtgtggccaccagggcacctccttcaatagactccaaaaggggcagctcctaccatctgggagaagcaatctaaggagatcacaaaaagtaacggaacaggagtcataatctttcttgaactcctgtggtttttactgaaacttg

SEQ ID NO: 574 - DNA, 2752 bp, Homo sapiens
acttatccaaggcctgaaagagacctccagcacaggtgaggaggccctggtagcggcggtacgttgctacgacgacctcagtcgcctactgtgggggctagagggtctcccactgaccgtgtctgctgttcagggagctcacccagtgctgcgctacacagaggtgttcccaccaactccagtccgtccagccttctccttctatgagactctgcgggagcggtcctcactgctgccccggctcgataagccctgtccggcctacgtggagcccatgaccgtggtttgtcacctggagggcagtggccagtggccacaggacgctgaggccgtgcagcgggtccgagctgccttccagctgcgcctggcagagctgttgacacaacagcatggtctgcagtgccgtgccactgccacgcacacggatgtccttaaggatggatttgtgtttcggattcgcgtggcctatcagcgggagccccagatcctgaaggaggtgcagagcccagaggggatgatctcgctgagggacacagctgcctccctccgccttgagagagacacaaggcagttgccactgctcaccagtgccctgcacggactgcagcagcagcacccagccttctctggtgtggcacggctggccaagcggtgggtgcgtgcccagcttcttggtgagggtttcgctgatgagagcctggatctggtggccgctgcccttttcctgcaccctgagcccttcacccctccgagttccccccaggttggcttccttcgattccttttcttggtatcaacgtttgattggaagaacaaccccctctttgtcaacctcaataatgagctcactgtggaggagcaggtggagatccgcagtggcttcctggcagctcgggcacagctccccgtcatggtcattgttaccccccaagaccgcaaaaactctgtgtggacacaggatggaccctcagcccagatcctgcagcagcttgtggtcctggcagctgaagccctgcccatgttagagaagcagctcatggatccccggggacctggggacatcaggacagtgttccggccgcccttggacatttacgacgtgctgattcgcctgtctcctcgccatatcccgcggcaccgccaggctgtggactcgccagctgcctccttctgccggggcctgctcagccagccggggccctcatccctgatgcccgtgctgggctatgatcctcctcagctctatctgacgcagctcagggaggcctttggggatctggcccttttcttctatgaccagcatggtggagaggtgattggtgtcctctggaagcccaccagcttccagccgcagcccttcaaggcctccagcacaaaggggcgcatggtgatgtctcgaggtggggagctagtaatggtgcccaatgttgaagcaatcctggaggactttgctgtgctgggtgaaggcctggtgcagactgtggaggcccgaagtgagaggtggactgtgtgatcccagctctggagcaagctgtagacggacagcaggacattggacctctagagcaagatgtcagtaggatgacctccaccctccttggacatgaatcctccatggagggcctgctggctgaacatgctgaatcatctccaacaaaacccagccccaactttctctctgatgctccagcattggggcaggggcatggtggcccatgtagtctcctgggcctcaccatcccagaagaggagtgggagccagctcagagaaggaactgaacccaggagatccatccacctattagccctgggcctggacctccctgcgatttcccactcctttcttagtcttcttccagaaacagagaaggggatgtgtgcctgggagaggctctgtctccttcctgctgccaggacctgtgcctagacttagcatgcccttcactgcagtgtcaggcctttagatgggacccagcgaaaatgtggcccttctgagtcacatcaccgacactgagcagtggaaaggggctatatgtgtatgaatagaccacattgaaggagcacaatgccctcctgtgttgatgccacttcccagggtggagacagtggaaaagaaccgaggacaggaaaggattgggtaggtgaaggggtcaggggactggtagtcacccaatcttggagaggtgcaaaaagcactgggggctacccgttagctgcatctgccctggctgtttgcccgttcatgtcacaaactgccactactatgtacctgcagtggggttgcagagatgggggagactcaagtcttactccccaggagctcccagggcccaaggaggagaatgctgcctcctttcagtctggtctacacccactttctggtagcctctctgcttcctgtaattctggctgtttttccagactcagctcaaatagtgcccctccttaagcccatccctcgcccccagcctgaggtgatctttccctcctctgaactattagagcagttactgtctgttcagttcgtttggcaggcacacacagtggcataaattctattgttttgaactctgatttaaaattaaattgcagctgggcgtggtggctcatgcttgtaatcccaacacttagggagtcaggagaatcacttgagctcaggagttctagaccaatctgggcaacagagagaccccatctcttttaaataaaaagttaaattgcttaatttcccccgtaaaaaaaaaaaaaaaaa

SEQ ID NO: 575 - DNA, 2830 bp, Homo sapiens
aattcggcacgaggagagctggttgcgtgagtctcctcagctctgcttaccggtgcgactagcggcagcgacgcggctaaaagcgaaggggcgagtgcgagtcccctgagctgtacgaacgcggtcgccatggaccgcccagatgaggggcctccggccaagacccgccgcctgagcagctccgagtctccacagcgcgacccgcccccgccgccgccgccgccgccgctcctccgactgccgctgcctccaccccagcagcgcccgaggctccaggaggaaacggaggcggcacaggtgctggccgatatgaggggggtgggactgggccccgcgctgcccccgccgcctccctatgtcattctcgaggagggggggatccgcgcatacttcacgctcggtgctgagtgtcccggctgggattctaccatcgagtcggggtatggggaggcgcccccgcccacggagagcctggaagcactccccactcctgaggcctcgggggggagcctggaaatcgattttcaggttgtacagtcgagcagttttggtggagagggggccctagaaacctgtagcgcagtggggtgggcgccccagaggttagttgacccgaagagcaaggaagaggcgatcatcatagtggaggatgaggatgaggatgagcgggagagtatgaggagcagcaggaggcggcggcggcggcggaggaggaagcagaggaaggtgaagagggaaagcagagagagaaatgccgagaggatggagagcatcctgcaggcactggaggatattcagctggatctggaggcagtgaacatcaaggcaggcaaagccttcctgcgtctcaagcgcaagttcatccagatgcgaagacccttcctggagcgcagagacctcatcatccagcatatcccaggcttctgggtcaaagcattcctcaaccaccccagaatttcaattttgatcaaccgacgtgatgaagacattttccgctacttgaccaatctgcaggtacaggatctcagacatatctccatgggctacaaaatgaagctgtacttccagactaacccctacttcacaaacatggtgattgtcaaggagttccagcgcaaccgctcaggccggctggtgtctcactcaaccccaatccgctggcaccggggccaggaaccccaggcccgtcgtcacgggaaccaggatgcgagccacagctttttcagctggttctcaaaccatagcctcccagaggctgacaggattgctgagattatcaagaatgatctgtgggttaaccctctacgctactacctgagagaaaggggctccaggataaagagaaagaagcaagaaatgaagaaacgtaaaaccaggggcagatgtgaggtggtgatcatggaagacgcccctgactattatgcagtggaagacattttcagcgagatctcagacattgatgagacaattcatgacatcaagatctctgacttcatggagaccaccgactacttcgagaccactgacaatgagataactgacatcaatgagaacatctgcgacagcgagaatcctgaccacaatgaggtccccaacaacgagaccactgataacaacgagagtgctgatgaccacgaaaccactgacaacaatgagagtgcagatgacaacaacgagaatcctgaagacaataacaagaacactgatgacaacgaagagaaccctaacaacaacgagaacacttacggcaacaacttcttcaaaggtggcttctggggcagccatggcaacaaccaggacagcagcgacagtgacaatgaagcagatgaggccagtgatgatgaagataatgatggcaacgaaggtgacaatgagggcagtgatgatgatggcaatgaaggtgacaatgaaggcagcgatgatgacgacagagacattgagtactatgagaaagttattgaagactttgacaaggatcaggctgactacgaggacgtgatagagatcatctcagacgaatcagtggaagaagagggcattgaggaaggcatccagcaagatgaggacatctatgaggaaggaaactatgaggaggaaggaagtgaagatgtctgggaagaaggggaagattcggacgactctgacctagaggatgtgcttcaggtcccaaacggttgggccaatccggggaagagggggaaaaccggataagggttttccccttttggggatcacctctctgtatcccccacccactatcccatttgccctcctcctcagctagggccacgcggccccacattgcacttctggggggtgaccgacttcgtacacgggtttaaagtttatttttatggtttagtcattgcagagttcttattttggggggagggaaagggggctagtccccttcttttggccctccgcccccgcaggcttctgtgtgctgctaactgtatttattgtgatgccttggtcagggcccctctacccacttctcccagtcagttgtggccccagcccctctccctgtgctgtgtggagtggacaccctgacccccgaagcggggagggccgctgtggccttcgtcacagccgcgcagtgcccatggaggcgctgctgccaccttcctctcccaagttctttctccatccctctcctcttcccgccgcgccgctagcccgcctcggtgtctatgcaaggccgcttcgccattgcggtattctttgcggtattcttgtccccgtcccccagaaggctcgcctctccccgtggaccctgttaatcccaataaaattctgagcaagttcaaaaaaaaaaaaaaaaaaa

SEQ ID NO: 576 - DNA, 1428 bp, Homo sapiens
gcccgcgcttccgtatcgctcctcgtaggccggggctcggcgcgcgcacccgcactaaagacgcttcttcccggcgggtaggaatcccgccggcgagccgaacagttccccgagcgcagcccgcggaccaccacccggccgcacgggccgcttttgtcccccgcccgccgcttctgtccgagaggccgcccgcgaggcgcatcctgaccgcgagcgtcgggtcccagagccgggcgcggctggggcccgaggctagcatctctcgggagccgcaaggcgagagctgcaaagtttaattagacacttcagaattttgatcacctaatgttgatttcagatgtaaaagtcaagagaagactctaaaaatagcaaagatgcttttgagccagaatgccttcatcttcagatcacttaatttggttctcatggtgtatatcagcctcgtgtttggtatttcatatgattcgcctgattacacagatgaatcttgcactttcaagatatcattgcgaaatttccggtccatcttatcatgggaattaaaaaaccactccattgtaccaactcactatacattgctgtatacaatcatgagtaaaccagaagatttgaaggtggttaagaactgtgcaaataccacaagatcattttgtgacctcacagatgagtggagaagcacacacgaggcctatgtcaccgtcctagaaggattcagcgggaacacaacgttgttcagttgctcacacaatttctggctggccatagacatgtcttttgaaccaccagagtttgagattgttggttttaccaaccacattaatgtgatggtgaaatttccatctattgttgaggaagaattacagtttgatttatctctcgtcattgaagaacagtcagagggaattgttaagaagcataaacccgaaataaaaggaaacatgagtggaaatttcacctatatcattgacaagttaattccaaacacgaactactgtgtatctgtttatttagagcacagtgatgagcaagcagtaataaagtctcccttaaaatgcaccctccttccacctggccaggaatcagaatcagcagaatctgccaaaataggaggaataattactgtgtttttgatagcattggtcttgacaagcaccatagtgacactgaaatggattggttatatatgcttaagaaatagcctccccaaagtcttgaggcaaggtctcgctaagggctggaatgcagtggctattcacaggtgcagtcataatgcactacagtctgaaactcctgagctcaaacagtcgtcctgcctaagcttccccagtagctgggattacaagcgtgcatccctgtgccccagtgattaagttttattatgtagaaaataaagagcaaacagtacagctgaaaaaaaaaaaaaaaaaa

SEQ ID NO: 577 - DNA, 437 bp, Homo sapiens
  misc_feature (390)..(390): n is a, c, g, or t
agtttgggttagattataatcatctgaagcacaggataaccgagaagcaaaattccattctggtacaaacacccaatttctagaaaagagaaaggaaaagaagaaatacgacgtgagcttttttgatcagaagactccatgaaatgagagcggtggtaatatgaatccacgtgatttttcaagtcttcctgttgtacagtcatcaaaatgaccaggtttgtgctgcaaaggagccagcaccatgtggctactgctttgattgttctcagatgaatgtttatacaaaataatatcttatcttcatttagtttataaacatacacagtgctgtccctttcaaattaaggaaaaaaaaccacacacacaaatactgcaaagtagcaaaatacnaaggaaaacaaagctacttttggttttggcaacattaaaaaagaaag

SEQ ID NO: 578 - DNA, 332 bp, Homo sapiens
atggaccccaactgctcgtgcgccactgggggctcctgctcctgtgccagctcctgcaagtgcaaagagtgcaaatgtacctcctgcaagaagagctgctgctcctgctgccccatgggctgtgccaagtgtgcccagggctgcgtctgcaaaggggcgtcggagaagtgcagctgctgtgcctgatgtggggacagacctgctcccagatgtaaacagagcaacctgcacaaacctggatttttttttctacaaccctgagcatttgctacatacttttttctatcaaatatgtaaacgccataaacagttttgcttgttcgggcctcctt

SEQ ID NO: 579 - DNA, 5927 bp, Homo sapiens
ccaggcggcgttgcggccccggccccggctccctgcgccgccgccgccgccgccgccgccgccgccgccgccgccgccagcgctagcgccagcagccgggcccgatcacccgccgcccggtgcccgccgccgcccgcgccagcaaccgggcccgatcacccgccgcccggtgcccgccgccgcccgcgccaccggcatggcgctccggggcttctgcagcgccgatggctccgacccgctctgggactggaatgtcacgtggaataccagcaaccccgacttcaccaagtgctttcagaacacggtcctcgtgtgggtgccttgtttttacctctgggcctgtttccccttctacttcctctatctctcccgacatgaccgaggctacattcagatgacacctctcaacaaaaccaaaactgccttgggatttttgctgtggatcgtctgctgggcagacctcttctactctttctgggaaagaagtcggggcatattcctggccccagtgtttctggtcagcccaactctcttgggcatcaccacgctgcttgctacctttttaattcagctggagaggaggaagggagttcagtcttcagggatcatgctcactttctggctggtagccctagtgtgtgccctagccatcctgagatccaaaattatgacagccttaaaagaggatgcccaggtggacctgtttcgtgacatcactttctacgtctacttttccctcttactcattcagctcgtcttgtcctgtttctcagatcgctcacccctgttctcggaaaccatccacgaccctaatccctgcccagagtccagcgcttccttcctgtcgaggatcaccttctggtggatcacagggttgattgtccggggctaccgccagcccctggagggcagtgacctctggtccttaaacaaggaggacacgtcggaacaagtcgtgcctgttttggtaaagaactggaagaaggaatgcgccaagactaggaagcagccggtgaaggttgtgtactcctccaaggatcctgcccagccgaaagagagttccaaggtggatgcgaatgaggaggtggaggctttgatcgtcaagtccccacagaaggagtggaacccctctctgtttaaggtgttatacaagacctttgggccctacttcctcatgagcttcttcttcaaggccatccacgacctgatgatgttttccgggccgcagatcttaaagttgctcatcaagttcgtgaatgacacgaaggccccagactggcagggctacttctacaccgtgctgctgtttgtcactgcctgcctgcagaccctcgtgctgcaccagtacttccacatctgcttcgtcagtggcatgaggatcaagaccgctgtcattggggctgtctatcggaaggccctggtgatcaccaattcagccagaaaatcctccacggtcggggagattgtcaacctcatgtctgtggacgctcagaggttcatggacttggccacgtacattaacatgatctggtcagcccccctgcaagtcatccttgctctctacctcctgtggctgaatctgggcccttccgtcctggctggagtggcggtgatggtcctcatggtgcccgtcaatgctgtgatggcgatgaagaccaagacgtatcaggtggcccacatgaagagcaaagacaatcggatcaagctgatgaacgaaattctcaatgggatcaaagtgctaaagctttatgcctgggagctggcattcaaggacaaggtgctggccatcaggcaggaggagctgaaggtgctgaagaagtctgcctacctgtcagccgtgggcaccttcacctgggtctgcacgccctttctggtggccttgtgcacatttgccgtctacgtgaccattgacgagaacaacatcctggatgcccagacagccttcgtgtctttggccttgttcaacatcctccggtttcccctgaacattctccccatggtcatcagcagcatcgtgcaggcgagtgtctccctcaaacgcctgaggatctttctctcccatgaggagctggaacctgacagcatcgagcgacggcctgtcaaagacggcgggggcacgaacagcatcaccgtgaggaatgccacattcacctgggccaggagcgaccctcccacactgaatggcatcaccttctccatccccgaaggtgctttggtggccgtggtgggccaggtgggctgcggaaagtcgtccctgctctcagccctcttggctgagatggacaaagtggaggggcacgtggctatcaagggctccgtggcctatgtgccacagcaggcctggattcagaatgattctctccgagaaaacatcctttttggatgtcagctggaggaaccatattacaggtccgtgatacaggcctgtgccctcctcccagacctggaaatcctgcccagtggggatcggacagagattggcgagaagggcgtgaacctgtctgggggccagaagcagcgcgtgagcctggcccgggccgtgtactccaacgctgacatttacctcttcgatgatcccctctcagcagtggatgcccatgtgggaaaacacatctttgaaaatgtgattggccccaaggggatgctgaagaacaagacgcggatcttggtcacgcacagcatgagctacttgccgcaggtggacgtcatcatcgtcatgagtggcggcaagatctctgagatgggctcctaccaggagctgctggctcgagacggcgccttcgctgagttcctgcgtacctatgccagcacagagcaggagcaggatgcagaggagaacggggtcacgggcgtcagcggtccagggaaggaagcaaagcaaatggagaatggcatgctggtgacggacagtgcagggaagcaactgcagagacagctcagcagctcctcctcctatagtggggacatcagcaggcaccacaacagcaccgcagaactgcagaaagctgaggccaagaaggaggagacctggaagctgatggaggctgacaaggcgcagacagggcaggtcaagctttccgtgtactgggactacatgaaggccatcggactcttcatctccttcctcagcatcttccttttcatgtgtaaccatgtgtccgcgctggcttccaactattggctcagcctctggactgatgaccccatcgtcaacgggactcaggagcacacgaaagtccggctgagcgtctatggagccctgggcatttcacaagggatcgccgtgtttggctactccatggccgtgtccatcggggggatcttggcttcccgctgtctgcacgtggacctgctgcacagcatcctgcggtcacccatgagcttctttgagcggacccccagtgggaacctggtgaaccgcttctccaaggagctggacacagtggactccatgatcccggaggtcatcaagatgttcatgggctccctgttcaacgtcattggtgcctgcatcgttatcctgctggccacgcccatcgccgccatcatcatcccgccccttggcctcatctacttcttcgtccagaggttctacgtggcttcctcccggcagctgaagcgcctcgagtcggtcagccgctccccggtctattcccatttcaacgagaccttgctgggggtcagcgtcattcgagccttcgaggagcaggagcgcttcatccaccagagtgacctgaaggtggacgagaaccagaaggcctattaccccagcatcgtggccaacaggtggctggccgtgcggctggagtgtgtgggcaactgcatcgttctgtttgctgccctgtttgcggtgatctccaggcacagcctcagtgctggcttggtgggcctctcagtgtcttactcattgcaggtcaccacgtacttgaactggctggttcggatgtcatctgaaatggaaaccaacatcgtggccgtggagaggctcaaggagtattcagagactgagaaggaggcgccctggcaaatccaggagacagctccgcccagcagctggccccaggtgggccgagtggaattccggaactactgcctgcgctaccgagaggacctggacttcgttctcaggcacatcaatgtcacgatcaatgggggagaaaaggtcggcatcgtggggcggacgggagctgggaagtcgtccctgaccctgggcttatttcggatcaacgagtctgccgaaggagagatcatcatcgatggcatcaacatcgccaagatcggcctgcacgacctccgcttcaagatcaccatcatcccccaggaccctgttttgttttcgggttccctccgaatgaacctggacccattcagccagtactcggatgaagaagtctggacgtccctggagctggcccacctgaaggacttcgtgtcagcccttcctgacaagctagaccatgaatgtgcagaaggcggggagaacctcagtgtcgggcagcgccagcttgtgtgcctagcccgggccctgctgaggaagacgaagatccttgtgttggatgaggccacggcagccgtggacctggaaacggacgacctcatccagtccaccatccggacacagttcgaggactgcaccgtcctcaccatcgcccaccggctcaacaccatcatggactacacaagggtgatcgtcttggacaaaggagaaatccaggagtacggcgccccatcggacctcctgcagcagagaggtcttttctacagcatggccaaagacgccggcttggtgtgagccccagagctggcatatctggtcagaactgcagggcctatatgccagcgcccagggaggagtcagtacccctggtaaaccaagcctcccacactgaaaccaaaacataaaaaccaaacccagacaaccaaaacatattcaaagcagcagccaccgccatccggtcccctgcctggaactggctgtgaagacccaggagagacagagatgcgaaccacccaaaacacgcacaccctgcccctggtgccctgagacagacacacagcctcacgcccccaggaatgcaagtggtttcctggtgcttcccacggaggagttttggcagccagacttctggaggaattggttgtatagaagatcctagtgaccaaattcagcctactgcctcggatctctccagccgaagtctgtggactgcaagtctttgagatgcttctggctcccatcacctctaacatccttgtctgggtctaccaggaacgcttcatttccttggggctgcagttttgtggttgaggggcctggagaaaatcattttctccccttggcagtgtcccagggccctggatggtcctcttaccaacatctggtcttccaggcactcaaaagctgggaaccagcatctcagcgccagctctaccagttctcgttttgggccagaggcagcctctgcactcccacgcctgtcctcctggaagggacctggttggactaacggctaacctggacctggaactgtagggccaggggattgtctcagggccgacgttccacctggggcttccctccccacccaccccgactccaggctttcccttttttcttttgttcaacattgtaagaacaatcaatgctgttattactgatcccaccatgattgatgtggggtaaatattaaggagatggcctcatgggaatttgaccttgactagaaatagagactgagagtgagcaaccagctggaaggtactatgccagtcctagcagaaaaatgtgttaggggcctggcccaaagcagtgttggttgcttacagtgttgattgattttgttcttttttcttaccacctcttttctttccctctcatggtacctgctcatggttatgaagctttcaaagtaaagaacacgaaatac

SEQ ID NO: 580 - DNA, 2477 bp, Homo sapiens
gacggcaaatggcggacttcgacacctacgacgatcgggcctacagcagcttcggcggcggcagagggtcccgcggcagtgctggtggccatggttcccgtagccagaaggagttgcccacagagcccccctacacagcatacgtaggaaatctacctttcaatacggttcagggcgacatagatgctatctttaaggatctcagcataaggagtgtacggctagtcagagacaaagacacagataaatttaaaggattctgctatgtagaattcgatgaagtggattcccttaaggaagccttgacatacgatggtgcactgttgggcgatcggtcacttcgtgtggacattgcagaaggcagaaaacaagataaaggtggctttggattcagaaaaggtggaccagatgacagaggcttcagggatgacttcttagggggcaggggaggtagtcgcccaggcgaccggcgaacaggcccccccatgggcagccgcttcagagatggccctcccctccgtggatccaacatggatttcagagaacccacagaagaggaaagagcacagagaccacgactccagcttaaacctcgaacagtcgcgacgcccctcaatcaagtagccaatcccaactctgctatcttcgggggtgccaggcctagagaggaagtcgttcaaaaggagcaagaatgagcctgcggttgggagggaatggggcgtggggggttagagcaggaccacagcctggtgagtccccgggcagccgtcctgcagccgccactcctgcgcctgccattggcctcctcacagcggaaacacagcttgtgagtgcatgtcagctgttaacaagtggtttttagtacattctgggctttgctgtatctatctagtgcctgtttgtgcgtttttttctttcttccgctgcttccccattttccttctgtcctttttctcctgctccttgttttcccagcagcacatggggttcctcggaggagcagaggtggccgccgtgggggggcgtttgggctgcggtgctgcgtcatttttcctttgctttctctttactttagacactggcccaactccaggcgtttcctttcattccctcagtgcttctcttctgacctgcatgttgagttctgtattgctggggcttccaacaaaaaccagagtcactgacagagggaacagcagagaccttgttggtattcagctgtgatggatatagagaatcagaggcaccttgttttcacaactaggataaaaatatctgcagggtcctttccattcctatttagagggagtcctggctccatgaccccctcccgagtggactgtccaagcagataggctcacacgagaaacagtgaggctgaaagggggggctatggaagagcggtagggagtccacggagaagatgcagtgaatgcttgcatgcattcacacgtgtgtgtgtcccagctagttcactcctttcgccgtgcgtggtggaggctggcctctctggctgggtgcagtgaatggccagcgggtttcttttctgctgggccaaggcgctttgggggtggagggggtggtgctggtgctgcactgggctgactgcggcgctgacgcagcgtttccccccatccctgttgcctgtgtgttgtgtggatctgttcctagtataggcaacataatgagatactgtgcttcccacctccccttcagttcagagccaaaatgggtctagaatctggctttactcatttcctttgataaattgtactatgcagagctgtcaggaaccttcagatagcagtagaggactgcagctgtctaggtctgcggccacatcttggggacacactggactgttcccatgtgcagggttcagcagttatgtgggagtgctaggggttaggcttttgagcttgaacgcctgcgtgtgaacagatgaaaaatccttcagtacccaagtcccagtctgtcctatggggagcagtttgggggcggccggcagcaggagcctgggaaagaggccctcgccaggtgatggcagggccagggtggcctggggcacccagcggaatgtgcttagtatttggtcaccagccgtcatcctgggcttttcctactgtgtcttgttacaaggcctcagcaatccacagaactctctctccttccttccacctgtcagcttctctgcttctgagataagaaccatttgtgtaacaccaacacttaacttcagaaagacatgcattatgtggtgtaatcaaacccgatgctttcagatgacctacttacatcttcaatgtggataagataaagaacaaaacacatgcatctaaactgctgggcaatccagttgacttttaaatgtaagaatggaattccaaacacttaacacattcagctatatgacagaaagtaaatctatggatatggtattttgtgaatgatcttttaaataaaagaaaaccttacgt

SEQ ID NO: 581 - DNA, 1874 bp, Homo sapiens
gggtcgaggcgacgtatcgataagtttttttttttttttttttttttaagaaatagggttttgctctgtcacacagactggaatgaagtagtgcagcctcaaactgttgggctcaagtaatcccccaacctcagcgtccccagtagctgggattacaagcatgtgccactacacccaattaattttttttttttttttgagactgagtctcactgtcaccaggctggagtgcagtggcatggtcttggctcactgaacctgcacctcccaggttcaagggattcccctgcctcagcctcctgaatagctgggattacaggcatgcgccaccacgcccagctaattttgtatttctagtagagacggggtgtctccgtgttggtcaggctggtctcgaactctcaacctcaggtcatccgcctgcctcggcctcccaaagtgctgggattacaggcgtgagccagggcccccggccgtatatataacatcttaagcacatttaatttgtctttaatttgcatttaactttttgtcccttgagaaataacaaacaaaatgatgataaaagttgttaaaactctggctgtatccccactgatttcgagggacatcctcctgttatccaggggagtctaattgtacagtctgttgagcccgggcaagtctgtgcttgagagaaactccccagacgactgcctgcctgtaagagacagtgaggaaacgcaaggcaggagacacattttcttcagttttatctgcgtaagcctgaagctttatgcattgaaatacagccagatatattcataatcatctcttagagcttggccatcccagtatcttcagttctgtgaccctgacagggaaggtcattggtgcagcccttccaagcaaatgcagttaaatttaacagaattttttttttcaatatgccagacacagtggtaaacgtgtaatataaagattgctctgacactcgtttgaatctgaacgactaccaggaaccttccttcttattatccaaagcctttctcttgcaattcactctttcttagcttttataataagggttgactacttgaaaatatggttcaattgtccttaccagcactataagcaattttagtttctcactagttttcatttgcttttcattttttgcaatgaaacccatcacagtctattgacctactacaattattaagtctattttatttgtgattatagtttgtgaaaatacaattaattactcatattatcaatgagagtacaatgtagcataatttccaccacacgttgttaatttaccaaactacttaaatctgatttacggatttttttctcgatagtagtttagatgccgtggtactttcaagatgatgagagaatcatgaacagagaagttcctttcaagtgaaaaatgcagctgtcgcagaatctctagtgtatccaggttagaatatttaaaactatgtattcatattagagagacatcatgggatatgataagcagaaaagagagacactaattgtgaatagataaaaggattcacatatgtcttaaaactttcaaataaaatatgcagagtgagtttttaaaacgtttttcctgtttatcccttgtttaatgttccgttttagttctaagtctatcctacaactaataacagatatgaaaagacttggaatgattgtctctgtgttctttgtgccataatttaaagtggccagaagcaagcaagtggaataaacaggacaattgcagagtttatggaggattaggccaattgcaggcttccacacttagggaggagaaaacatcctcatgaatatgagattggaagtgtctagctgtgagaaaaaaaaaaaaaaaaaaa

SEQ ID NO: 582 - DNA, 2745 bp, Homo sapiens
aggacagccggcgcgcggccgtgcccacaagttgccggcagctgagcgccgcgcctcctcctgctcgcagccccctacgcccacccggcggcggtggccagcgccaggacgcacatcccgcggacaccgaccccagatgtaaagcgggaccccagcccctcgccccccggcgcgatcgacagtctcgccagcgtctcctctgccaaaacccagggctggaagatgtggcagccggccacggagcgcctgcaggagagatttgcagacacagaagcggcacagagaaggccattgtgaagatcaaggcagaaaccggagttatggcatcataagccaaggaatgccaaggattgctggcaaccacctgatgttagaagagtcgaggacatgttcttctccagagcttttggatggtgtgtggccctgccaacctttacattttggacttccagcctccgaaatgcactttcagaccatgctgaagtctaaattgaatgtcttaacactgaaaaaggaacctctcccagcggtcatcttccatgagccggaggccattgagctgtgcacgaccacaccgctgatgaagacaaggactcacagtggctgcaaggttacctacctgggcaaagtctccaccactggcatgcagtttttgtcaggctgcacagaaaagccagtcattgagctctggaagaagcacacgctagcccgagaggatgtctttccggccaatgccctcctggaaatccggccattccaagtttggctccatcatctcgaccacaaaggggaggccacagtgcacatggataccttccaggtggcccgcatcgcctactgcaccgccgaccacaacgtgagccccaacatcttcgcctgggtctacagggagatcaatgatgacctgtcctaccagatggactgccacgccgtggagtgcgagagcaagctcgaggccaagaaactggcccacgccatgatggaggccttcaggaagactttccacagtatgaagagcgacgggcggatccacagcaacagctcctccgaagaggtttcccaggaattggaatccgatgatggctgaatgaacttgagacgcttcagcaaaggcagcattggtcacggagttcaagggaatagatgagtaagcaacgtttcaaatttgggatgaaaagactgccaaactattggctgaccaaggtttttaaattcagaagagcaattctaaatctaaagaaatgtatcattaaagtaattacgttacattgaaacctgctgctgctgtgactgtgaggagggtgggagtgtggatggggaggaaggttctaggctctcttatttttctcatttcccaatgcctctctgtgggagagctccatgccagttttcaccacgctcaggcaaatactctgcagctgttattggatgggccattccgatctgccttatgaaattccacaagaatgttaggggcacctatgggatctctagtggggtgggcagggtgctgatggggacgctggccgcagggaggaaggaacatctcgggagggccctctgttcctctcccacggcagatgccctcctctgtatgcaaatcagcacagcctttattgagctttacaactaacaacctgatagttggcagttaattcacagttacagataatgcttttatttacataaatataccaagtagtaccctcttattgtattcacttcatctattttcttagaatacttgcaattactaatgaccccttccctttccctcctgctgccctgtccaccctctttccccttctaacatccttagagggatgaaatctcagcatatgttgcaggacaccaaaaggaagaaaacaatcaagcaaataaaataaacagtcaaacaaaccaggagtttaaaacaacaaccccaacaacagaagccttggcaaagaggaataagtgatcagcaagtgaacacactctatgtcaactctccttttatccagctgagatttatggtaacttatttaattaatggtcctgtctgatgcatccttgatggcaagcttcaaatctgatttgctatcaccgaggaaaccttgcccccatcactcagcattgcacttagatacagaatgagttagataaacttggcttgtctagagacccatgtcatcttaacctaaagggaaatcttattgcgttatcataaaattgatgatatcttagggtcagaattgccctttttttttattttgaatgggaagttctcactaaaacaatcctgagatttcttaatttcatggttctttaaatattataaacacagagtcaacatagaatgaaattgtatttgttaaaatacacacattggaggacaagagcagatgactacttttcgaagtaatgctgctccttcctaaaagtctgttttcaatcctggtaatattaggggcactgcggcacctaagaagccttaaatgagagctaatccaatctagagagcgatggtgtcagcatttcggtctgcatatctgtgtgtccgtatctgcgtttgtgtgcgtgtacgtgtgcccctgtgtgtgggcccagttttcaggcatgtagaataagcatggagtcatattgaggaggactcacttcttgaagatatgcttgttgctttacaacatatgtaagctattctttagcataaatgcattcattctttaataaaaatatgtttgcattaataaagctgaggagtttcat

SEQ ID NO: 583 - DNA, 2952 bp, Homo sapiens
agagatgctcaatgactcccaatacaacccaaagagacaaacgcttgttttttctgccacactcaccctggtgcatcaggctcctgctcgaatccttcataagaagcacaccaagaaaatggataaaacagccaaacttgacctccttatgcagaaaattggcatgaggggcaagcccaaggtcattgacctcacaaggaatgaggccacggtggagacgctaacagagaccaagatccattgtgagactgatgagaaagacttctacttgtactacttcctgatgcagtatccaggccgcagcttagtgtttgccaacagtatctcctgcatcaaacgcctctctgggctcctcaaagtccttgatatcatgcccttgaccctgcatgcctgtatgcaccagaagcagaggctcagaaacctggagcagtttgcccgtctggaagactgtgttctcttggcaacagatgtggcggctcggggtctggatattcctaaagtccagcatgtcatccattaccaggtcccacgtacctcggagatttatgtccaccgaagtggtcgaactgctcgagctaccaatgaaggcctcagtctgatgctcattgggcctgaggatgtgatcaactttaagaagatttacaaagcgctcaagaaagatgaggatatcccactgttccccgtgcagacaaaatacatggatgtggtcaaggagcgaatccgtttagctcgacagattgagaaatctgagtatcggaacttccaggcttgcctgcacaactcttggattgagcaggcagcagctgccctgctctgttggtggttggggacagctcgcctgcagtggatgccgtggtggagtgcaactcaaaattggacccaacaaagaccactctcctcaagatggcggactgtggcggcctcccgcagatctcccagccggccaagctcgctgaggccttcaagtacttcgtgcagggcatgggatacatgccctcggctagcatgacccgcctgatgcggtcccgcacagcctctggttccagcgtcacttctctggatggcacccgcagccgctcccacaccagcgagggcacccgaagccgctcccacaccagcgagggcacccgcagccgctcgcacaccagcgagggggcccacctggacatcacccccaactcgggtgctgctgggaacagcgccgggcccaagtccatggaggtctcctgctaggcggcctgcccagctgccgcccccggactctgatctctgtagtggccccctcctccccggccccttttcgccccctgcctgccatactgcgcctaactcggtattaatccaaagcttattttgtaagagtgagctctggtggagacaaatgaggtctattacgtgggtgccctctccaaaggcggggtggcggtggaccaaaggaaggaagcaagcatctccgcatcgcatcctcttccattaaccagtggccggttgccactctcctcccctccctcagagacaccaaactgccaaaaacgagacgcgtagcagcacacacttcacaaagccaagcctaggccgccctgagcatcctggttcaaacgggtgcctggtcagaaggccagccgcccacttcccgtttcctctttaactgaggagaagctgatccagtttccggaaacaaaatccttttctcatttggggaggggggtaatagtgacatgcaggcacctcttttaaacaggcaaaacaggaagggggaaaaggtgggattcatgtcgaggctagaggcatttggaacaacaaatctacgtagttaacttgaagaaaccgatttttaaagttggtgcatctagaaagctttgaatgcagaagcaaacaagcttgatttttctagcatcctcttaatgtgcagcaaaagcaggcgacaaaatctcctggctttacagacaaaaatatttcagcaaacgttgggcatcatggtttttgaaggctttagttctgctttctgcctctcctccacagccccaacctcccacccctgatacatgagccagtgattattcttgttcagggagaagatcatttagatttgttttgcattccttagaatggagggcaacattccacagctgccctggctgtgatgagtgtccttgcaggggccggagtaggagcactggggtgggggtggaattggggttactcgatgtaagggattccttgttgttgtgttgagatccagtgcagttgtgatttctgtggatcccagcttggttccaggaattttgtgtgattggcttaaatccagttttcaatcttcgacagctgggctggaacgtgaactcagtagctgaacctgtctgacccggtcacgttcttggatcctcagaactctttgctcttgtcggggtgggggtgggaactcacgtggggagcggtggctgagaaaatgtaaggattctggaatacatattccatgggactttccttccctctcctgcttcctcttttcctgctccctaacctttcgccgaatggggcagcaccactgacgtttctgggcggccagtgcggctgccaggttcctgtactactgccttgtacttttcattttggctcaccgtggattttctcataggaagtttggtcagagtgaattgaatattgtaagtcagccactgggacccgaggatttctgggaccccgcagttgggaggaggaagtagtccagccttccaggtggcgtgagaggcaatgactcgttacctgccgcccatcaccttggaggccttccctggccttgagtagaaaagtcggggatcggggcaagagaggctgagtacggatgggaaactattgtgcacaagtctttccagaggagtttcttaatgagatatttgtatttatttccagaccaataaatttgtaactttgcaaaaaaaaaaaaaaaaa

SEQ ID NO: 584 - DNA, 2357 bp, Homo sapiens
cctgtaaactggctcgggcgcccccacgcccgcccttccttcttctcccagcattgccccccccacgtttcagcacagcgctggccgcagtctgacaggaaagggacggagccaagatggcggcggccgacggcgacgactcgctgtaccccatcgcggtgctcatagacgaactccgcaatgaggacgttcagcttcgcctcaacagcatcaagaagctgtccaccatcgccttggcccttggggttgaaaggacccgaagtgagcttctgcctttccttacagataccatctatgatgaagatgaggtcctcctggccctggcagaacagctgggaaccttcactaccctggtgggaggcccagagtacgtgcactgcctgctgccaccgctggagtcgctggccacagtggaggagacagtggtgcgggacaaggcagtggagtccttacgggccatctcacacgagcactcgccctctgacctggaggcgcactttgtgccgctagtgaagcggctggcgggcggcgactggttcacctcccgcacctcggcctgcggcctcttctccgtctgctacccccgagtgtccagtgctgtgaaggcggaacttcgacagtacttccggaacctgtgctcagatgacacccccatggtgcggcgggccgcagcctccaagctgggggagtttgccaaggtgctggagctggacaacgtcaagagtgagatcatccccatgttctccaacctggcctctgacgagcaggactcggtgcggctgctggcggtggaggcgtgcgtgaacatcgcccagcttctgccccaggaggatctggaggccctggtgatgcccactctgcgccaggccgctgaagacaagtcctggcgcgtccgctacatggtggctgacaagttcacagagctccagaaagcagtggggcctgagatcaccaagacagacctggtccctgccttccagaacctgatgaaagactgtgaggccgaggtgagggccgcagcctcccacaaggtcaaagagttctgtgaaaacctctcagctgactgtcgggagaatgtgatcatgtcccagatcttgccctgcatcaaggagctggtgtccgatgccaaccaacatgtcaagtctgccctggcctcagtcatcatgggtctctctcccatcttgggcaaagacaacaccatcgagcacctcttgcccctcttcctggctcagctgaaggatgagtgccctgaggtacggctgaacatcatctctaacctggactgtgtgaacgaggtgattggcatccggcagctgtcccagtccctgctccctgccattgtggagctggctgaggacgccaagtggcgggtgcggctggccatcattgagtacatgcccctcctggctggacagctgggagtggagttctttgatgagaaacttaactccttgtgcatggcctggcttgtggatcatgtatatgccatccgcgaggcagccaccagcaacctgaagaagctagtggaaaagtttgggaaggagtgggcccatgccacaatcatccccaaggtcttggccatgtccggagaccccaactacctgcaccgcatgactacgctcttctgcatcaatgtgctgtctgaggtctgtgggcaggacatcaccaccaagcacatgctacccacggttctgcgcatggctggggacccggttgccaatgtccgcttcaatgtggccaagtctctgcagaagatagggcccatcctggacaacagcaccttgcagagtgaagtcaagcccatcctagagaagctgacccaggaccaggatgtggacgtcaaatactttgcccaggaggctctgactgttctgtctctcgcctgatgctggaagaggagcaaacactggcctctggtgtccaccctccaacccccacaagtccctctttggggagacactggggggcctttggctgtcactccctgtgcatggtctgaccccaggccccttcccccagcacggttcctcctctccccagcctgggaagatgtctcactgtccacctcccaacgggctaggggagcacggggttggacaggacagtgaccttgggaggaaggggctactccgcccacgtcagggagagatgtgagcatcccgggtcactggatcctgctgctgtaatgggaacccctcccccatttacttctccacctcccgtcctccccatcattggtttttttttgtgtgtcaactgtgccgtttttattttattccttttattttcccccttttcacagagaaataaaggtctagaagtaaaaaaaaaaaaaaaaaaaaaaaaaaaaaaaaaaa

SEQ ID NO: 585 - DNA, 1327 bp, Homo sapiens
ctcctctccgcgcggggcgggctccgcgccacgtgactccgcggccgggccgggacgcgacgggacgcgctgggaccggcgtcgggggtcgcggggaccatgcagcggaggtgggtcttcgtgctgctcgacgtgctgtgcttactggtcgcctccctgcccttcgctatcctgacgctggtgaacgccccgtacaagcgaggattttactgcggggatgactccatccggtacccctaccgtccagataccatcacccacgggctcatggctggggtcaccatcacggccaccgtcatccttgtctcggccggggaagcctacctggtgtacacagaccggctctattctcgctcggacttcaacaactacgtggctgctgtatacaaggtgctggggaccttcctgtttggggctgccgtgagccagtctctgacagacctggccaagtacatgattgggcgtctgaggcccaacttcctagccgtctgcgaccccgactggagccgggtcaactgctcggtctatgtgcagctggagaaggtgtgcaggggaaaccctgctgatgtcaccgaggccaggttgtctttctactcgggacactcttcctttgggatgtactgcatggtgttcttggcgctgtatgtgcaggcacgactctgttggaagtgggcacggctgctgcgacccacagtccagttcttcctggtggcctttgccctctacgtgggctacacccgcgtgtctgattacaaacaccactggagcgatgtccttgttggcctcctgcagggggcactggtggctgccctcactgtctgctacatctcagacttcttcaaagcccgacccccacagcactgtctgaaggaggaggagctggaacggaagcccagcctgtcactgacgttgaccctgggcgaggctgaccacaaccactatggatacccgcactcctcctcctgaggccggaccccgcccaggcagggagctgctgtgagtccagctgaggcccacccaggtggtccctccagccctggttaggcactgagggctctggacgggctccaggaaccctgggctgatgggagcagtgagcgggctccgctgccccctgccctgcactggaccaggagtctggagatgcctgggtagccctcagcatttggaggggaacctgttcccgtcggtccccaaatatccccttctttttatggggttaaggaagggaccgagagatcagatagttgctgttttgtaaaatgtaatgtatatgtggtttttagtaaaatagggcacctgtttcacaaaaaaaaaaaaaaaaaaa

SEQ ID NO: 586 - DNA, 580 bp, Homo sapiens
  misc_feature (16)..(16): n is a, c, g, or t
  misc_feature (547)..(547): n is a, c, g, or t
  misc_feature (560)..(560): n is a, c, g, or t
  misc_feature (579)..(579): n is a, c, g, or t
gttttaaaattttctntttaatttaaacaggtctttgcaaaaacagaagcacagaagggagcctatatagaactaacactgcagacttatcaagaagcactcagtcgccattctgcagcttcctaaaaatattttaaaaatacatttattttactaaatactgactacatttctctgttaatattgagctaaatgttaaaaaatggccagattaaaagatatcaatttgtagttctccctacaaagcaaaaattattaccctactcacttttcgtaggctacaaggatatttgagtgcctggttatgaatttctcaaatcatgttagatgagcgtacggttaaaaagtctggtgtgtttttgtgttaccaaatagggcaaacgttaacttagacagacccccagcttaatgaggtcagaggaacagaggtttcacatcctgactccagaaatgggtagctgctagacaaaatcggggcaagacctgtggaatgatgccatgaggtcaagaaaaagggtttagagaattacagccggatattcagccnaagaaaatgtgantgacacattgaaatgccgnt

SEQ ID NO: 587 - DNA, 2024 bp, Homo sapiens
gtgcgcgcgcccggtccgcgcctccgccgctttttatagcggccgcgggcggcggcggcagcggttggaggttgtaggaccggcgaggaataggaatcatggcggctgcgctgttcgtgctgctgggattcgcgctgctgggcacccacggagcctccggggctgccggcttcgtccaggcgccgctgtcccagcagaggtgggtggggggcagtgtggagctgcactgcgaggccgtgggcagcccggtgcccgagatccagtggtggtttgaagggcagggtcccaacgacacctgctcccagctctgggacggcgcccggctggaccgcgtccacatccacgccacctaccaccagcacgcggccagcaccatctccatcgacacgctcgtggaggaggacacgggcacttacgagtgccgggccagcaacgacccggatcgcaaccacctgacccgggcgcccagggtcaagtgggtccgcgcccaggcagtcgtgctagtcctggaacccggcacagtcttcactaccgtagaagaccttggctccaagatactcctcacctgctccttgaatgacagcgccacagaggtcacagggcaccgctggctgaaggggggcgtggtgctgaaggaggacgcgctgcccggccagaaaacggagttcaaggtggactccgacgaccagtggggagagtactcctgcgtcttcctccccgagcccatgggcacggccaacatccagctccacgggcctcccagagtgaaggctgtgaagtcgtcagaacacatcaacgagggggagacggccatgctggtctgcaagtcagagtccgtgccacctgtcactgactgggcctggtacaagatcactgactctgaggacaaggccctcatgaacggctccgagagcaggttcttcgtgagttcctcgcagggccggtcagagctacacattgagaacctgaacatggaggccgaccccggccagtaccggtgcaacggcaccagctccaagggctccgaccaggccatcatcacgctccgcgtgcgcagccacctggccgccctctggcccttcctgggcatcgtggctgaggtgctggtgctggtcaccatcatcttcatctacgagaagcgccggaagcccgaggacgtcctggatgatgacgacgccggctctgcacccctgaagagcagcgggcagcaccagaatgacaaaggcaagaacgtccgccagaggaactcttcctgaggcaggtggcccgaggacgctccctgctccacgtctgcgccgccgccggagtccactcccagtgcttgcaagattccaagttctcacctcttaaagaaaacccaccccgtagattcccatcatacacttccttcttttttaaaaaagttgggttttctccattcaggattctgttccttaggtttttttccttctgaagtgtttcacgagagcccgggagctgctgccctgcggccccgtctgtggctttcagcctctgggtctgagtcatggccgggtgggcggcacagccttctccactggccggagtcagtgccaggtccttgccctttgtggaaagtcacaggtcacacgaggggccccgtgtcctgcctgtctgaagccaatgctgtctggttgcgccatttttgtgcttttatgtttaattttatgagggccacgggtctgtgttcgactcagcctcagggacgactctgacctcttggccacagaggactcacttgcccacaccgagggcgaccccgtcacagcctcaagtcactcccaagccccctccttgtctgtgcatccgggggcagctctggagggggtttgctggggaactggcgccatcgccgggactccagaaccgcagaagcctccccagctcacccctggaggacggccggctctctatagcaccagggctcacgtgggaacccccctcccacccaccgccacaataaagatcgcccccacctccaccctcaaaaaaaaaaaaaaaaaaaa

SEQ ID NO: 588 - DNA, 3130 bp, Homo sapiens
gcggagcgcggcgcgcgcggcggttgggccgttggctgttcggccctgggatccgccgccactccgcgatcagaccgctctgtgccgcgagccgccgtgagcactcggattcaagccggcgccaacgagtccgggggcatcgcccgcagcggccaagctcatggccggctgagcgggacgccgcctccgcctcagccaccgccgccgccgccgcctcctcctcctcagccggcggcggcccgggcccagcaaccatggctgaagactactgggacgggcgcctgcggcgaacaggaggagaaggaggtcgcgcggcctcatcccgggccgccgccccaggcgccgccgcgccggccccgcggctctgaggttgctcgcgcgcccccgccgatcgccatggatcggatgaagaagatcaaacggcagctgtcaatgacactccgaggtggccgaggcatagacaagaccaatggtgcccctgagcagataggcctggatgagagtggtggtggtggcggcagtgaccctggagaggcccccacacgtgctgctcctggggaacttcgttctgcacggggcccactcagctctgcaccagagattgtgcacgaggacttgaagatggggtctgatggggagagtgaccaggcttcagccacgtcctcggatgaggtgcagtctccagtgagagtgcgtatgcgcaaccatcccccacgcaagatctccactgaggacatcaacaagcgcctatcactaccagctgacatccggctgcctgagggctacctggagaagctgaccctcaatagccccatctttgacaagcccctcagccgccgcctccgtcgtgtcagcctatctgagattggctttgggaaactggagacctacattaagctggacaaactgggcgagggtacctatgccaccgtctacaaaggcaaaagcaagctcacagacaaccttgtggcactcaaggagatcagactggaacatgaagagggggcaccctgcaccgccatccgggaagtgtccctgctcaaggacctcaaacacgccaacatcgttacgctacatgacattatccacacggagaagtccctcacccttgtctttgagtacctggacaaggacctgaagcagtacctggatgactgtgggaacatcatcaacatgcacaacgtgaaactgttcctgttccagctgctccgtggcctggcctactgccaccggcagaaggtgctacaccgagacctcaagccccagaacctgctcatcaacgagaggggagagctcaagctggctgactttggcctggcccgagccaagtcaatcccaacaaagacatactccaatgaggtggtgacactgtggtaccggccccctgacatcctgcttgggtccacggactactccactcagattgacatgtggggtgtgggctgcatcttctatgagatggccacaggccgtcccctctttccgggctccacggtggaggaacagctacacttcatcttccgtatcttaggaaccccaactgaggagacgtggccaggcatcctgtccaacgaggagttcaagacatacaactaccccaagtaccgagccgaggcccttttgagccacgcaccccgacttgatagcgacggggccgacctcctcaccaagctgttgcagtttgagggtcgaaatcggatctccgcagaggatgccatgaaacatccattcttcctcagtctgggggagcggatccacaaacttcctgacactacttccatatttgcactaaaggagattcagctacaaaaggaggccagccttcggtcttcgtcgatgcctgactcaggcaggccagctttccgcgtggtggacaccgagttctaagccacagaccgaggccccagcaggcagcggctggagggatgccacacccctcacagggcagcccccaactacatcttccctgcttactctctgcctacctgcctgagccatgttcacctgcccacttgtcccctgctgcctgcccaaacaccccaccattggcctgtcaacccacccattggcctgtctgctgggtgctaacaaagctctcatcactccttcacttggtctgtctgtctctgtcttggtagttgccggtggacagcatggccgtgccagcctcccacactgaggccaggtctaccccccatcataccagcccccaggaccactaccccacggccagccaggggtccagagctagcccaggctggggatctcgactcagacaagatggtgacaatgccttgagtctgaggcatcctctgcctgctttcctgcctgccccacctgcctcatattgtgtgggcctttttttgtttgtttcattcattgtttttttttttttaattattttaaatgagatttttgttttttttaaatgcaatatctctgtatacagactggctgggccccaccccctgcgtgtggccctcccacagtattttgtgcaatgaagccctgctcccagcctttcagagacagggacacagcccctatttggaaccctgatcatcaccagaccctgggattggctatgggaaagcatgccacagccactcgccttcctacccccgcccgccatccccagttgcagggggatctggggactaccagagactctgggaaatggacaaggtggggggccccactctttctctcctgcagtcccgtagctggggcctccttccttctcagggtctccccagcccagtccccttgctcccatcccactcggtgctgttgggtaggggccctgccaggaactgaccagctcagcgaggagccataatgtgcatatgtgcacaagcagggttgggggaggggggtgtgaggggttgtgcccaggtgttgccccctatctcctggggagggtgaggcagggcagggacagtctccagggtcagtccctggatgggtggttacctccccttcctccaccctaagccctggggccctgaaatggggtgggagggcaggggtgggagccctcctagtgggtttggggggttgggttcctgaatgcaccataatcgctgtatgaaatattaaaaagtctaaagtgaaaaaaaaaaaaaaaaaa

SEQ ID NO: 589 - DNA, 804 bp, Homo sapiens
gcaaatgtttgattaattctgctcatatgcacatctgaaagcatgagacacactccacagacagcacgcactggagctggtggggcagatgggcactcgccgattaggtattaatgtcaataatacgtgcataaagtgctgataaaataacttaagtgttacaaaaacagacagtccacggtggctgcaggcacatgcaggcgggactgggtcagacactccagggctgcacatgttccagctggcctgagtccgacacgtcatagctggccttgtacttggccaggattttcatgaggggccgtagcttgagccaccactgttctttgggaatcctgtgctcaaaatccgtttgcttcttcagctctgccacaggtttgaaaaataacgtttcttttgcttattcccagcacacaaatggaatcatcggtggtaaatttttttcctctgccccgggcctccttgagttttgcagtgatccactccatagctctggcagagattttggttccaaagtttctatcaaatggagagggtgccccaccctgctgcatgtgacccagcacgttcttcctgcagtcaaacacgcctttgccctcttctgaatacagctggtaaatgaagtcggtggtgtagttttcactgcagctctcatttctgagcacaaggcctctctggatggtggtcttcattttctccgtcaggtgctccacgttggactgcagatcctgatgtcgaagggctcttcgaaatgtatgcggcatcagtccggccgcagccccccatgttggcaggtagcacagt

SEQ ID NO: 590 - DNA, 2626 bp, Homo sapiens
ctcaggtgcgcgggaggaaggcagcggcctgccgcgcagagccctgcgcgcccgcgaggtggcgccatagccgcagcagcgcccgccggcccgggccgctccagataagagtgtgcggaaagcgcggcggggctgagacgcgaccaggacgcggggaggacggaccagcaggacagaccgaccgggggcccggcgggcggagggcagcgcagccacgtcccccctggatccgccgtcagccgggcccggggctttcgacatgccccccaggagagtgtgctgggcagacgatgctggacacgatggaggcgcccggccactccaggcagctgctgctgcagctcaacaaccagcgcaccaagggcttcttgtgcgacgtgatcatcgtggtgcagaacgccctcttccgcgcgcacaagaacgtgctggcggccagcagcgcctacctcaagtccctggtggtgcatgacaacctgctcaacctggaccatgacatggtgagcccggccgtgttccgcctggtgctggacttcatctacaccggccgcctggctgacggcgcagaggcggctgcggccgcggccgtggccccgggggctgagccgagcctgggcgccgtgctggccgccgccagctacctgcagatccccgacctcgtggcgctgtgcaagaaacgcctcaagcgccacggcaagtactgccacctgcggggcggcggcggcggcggcggcggctacgcgccctatggtcggccgggccggggcctgcgggccgccacgccggtcatccaggcctgctacccgtccccagtcgggcctccgccgccgcctgccgcggagccgccctcgggcccagaggccgcggtcaacacgcactgcgccgagctgtacgcgtcgggacccggcccggccgccgcactctgtgcctcggagcgccgctgctcccctctttgtggcctggacctgtccaagaagagcccgccgggctccgcggcgccagagcggccgctggctgagcgcgagctgcccccgcgcccggacagccctcccagcgccggccccgccgcctacaaggagccgcctctcgccctgccgtcgctgccgccgctgcccttccagaagctggaggaggccgcaccgccttccgacccatttcgcggcggcagcggcagcccgggacccgagccccccggccgccccgacgggcctagtctcctctatcgctggatgaagcacgagccgggcctgggtagctatggcgacgagctgggccgggagcgcggctcccccagcgagcgctgcgaagagcgtggtggggacgcggccgtctcgcccggggggcccccgctcggcctggcgccgccgccgcgctaccctggcagcctggacgggcccggcgcgggcggcgacggcgacgactacaagagcagcagcgaggagaccggtagcagcgaggaccccagcccgcctggcggccacctcgagggctacccatgcccgcacctggcctatggcgagcccgagagcttcggtgacaacctgtacgtgtgcattccgtgcggcaagggcttccccagctctgagcagctgaacgcgcacgtggaggctcacgtggaggaggaggaagcgctgtacggcagggccgaggcggccgaagtggccgctggggccgccggcctagggcccccttttggaggcggcggggacaaggtcgccggggctccgggtggcctgggagagctgctgcggccctaccgctgcgcgtcgtgcgacaagagctacaaggacccggccacgctgcggcagcacgagaagacgcactggctgacccggccctacccatgcaccatctgcgggaagaagttcacgcagcgtgggaccatgacgcgccacatgcgcagccacctgggcctcaagcccttcgcgtgcgacgcgtgcggcatgcggttcacgcgccagtaccgcctcacggagcacatgcgcatccactcgggcgagaagccctacgagtgccaggtgtgcggcggcaagttcgcacagcaacgcaacctcatcagccacatgaagatgcacgccgtggggggcgcggccggcgcggccggggcgctggcgggcttgggggggctccccggcgtccccggccccgacggcaagggcaagctcgacttccccgagggcgtctttgctgtggctcgcctcacggccgagcagctgagcctgaagcagcaggacaaggcggccgcggccgagctgctggcgcagaccacgcacttcctgcacgaccccaaggtggcgctggagagcctctacccgctggccaagttcacggccgagctgggcctcagccccgacaaggcggccgaggtgctgagccagggcgctcacctggcggccgggcccgacggccggaccatcgaccgtttctctcccacctagagcgcccctcgccagcccgctctgtcgctgctgcgcggccctggcccgcaccccagggagcggcgggggcggcgcgcagggcccactgtgcccgggacaaccgcagcgtcgccacagtggcggctccacctctcggcggcctcacctggcctcactgcttcgtgccttagctcgggggtcgggggagaacc

SEQ ID NO: 591 - DNA, 125 bp, Homo sapiens; identical to SEQ ID NO: 534
  misc_feature (52)..(52): n is a, c, g, or t
  misc_feature (70)..(71): n is a, c, g, or t

SEQ ID NO: 592 - DNA, 213 bp, Homo sapiens
ttttttttttttttttttttttttttttttgctgcagaaaggcttttactgggcatacggggtgagtctcaagccagtggaccagtgaggggtgagggcacgtcctccgaagagcatggggtggcatccctgcccaggggccttagcctgaatgcactaagggctggccctcagacaggctcaggggaggtccgcccaaagggtttgggccct

SEQ ID NO: 593 - DNA, 3008 bp, Homo sapiens
taattatgggtctgtaaccaccctggactgggtgctcctcactgacggacttgtctgaacctctctttgtctccagcgcccagcactgggcctggcaaaacctgagacgcccggtacatgttggccaaatgaatgaaccagattcagaccggcaggggcgctgtggtttaggaggggcctggggtttctcccaggaggtttttgggcttgcgctggagggctctggactcccgtttgcgccagtggcctgcatcctggtcctgtcttcctcatgtttgaatttctttgctttcctagtctggggagcagggaggagccctgtgccctgtcccaggatccatgggtaggaacaccatggacagggagagcaaacggggccatctgtcaccaggggcttagggaaggccgagccagcctgggtcaaagaagtcaaaggggctgcctggaggaggcagcctgtcagctggtgcatcagaggctgtggccaggccagctgggctcggggagcgccagcctgagaggagcgcgtgagcgtcgcgggagcctcgggcaccatgagcgacgtggctattgtgaaggagggttggctgcacaaacgaggggagtacatcaagacctggcggccacgctacttcctcctcaagaatgatggcaccttcattggctacaaggagcggccgcaggatgtggaccaacgtgaggctcccctcaacaacttctctgtggcgcagtgccagctgatgaagacggagcggccccggcccaacaccttcatcatccgctgcctgcagtggaccactgtcatcgaacgcaccttccatgtggagactcctgaggagcgggaggagtggacaaccgccatccagactgtggctgacggcctcaagaagcaggaggaggaggagatggacttccggtcgggctcacccagtgacaactcaggggctgaagagatggaggtgtccctggccaagcccaagcaccgcgtgaccatgaacgagtttgagtacctgaagctgctgggcaagggcactttcggcaaggtgatcctggtgaaggagaaggccacaggccgctactacgccatgaagatcctcaagaaggaagtcatcgtggccaaggacgaggtggcccacacactcaccgagaaccgcgtcctgcagaactccaggcaccccttcctcacagccctgaagtactctttccagacccacgaccgcctctgctttgtcatggagtacgccaacgggggcgagctgttcttccacctgtcccgggagcgtgtgttctccgaggaccgggcccgcttctatggcgctgagattgtgtcagccctggactacctgcactcggagaagaacgtggtgtaccgggacctcaagctggagaacctcatgctggacaaggacgggcacattaagatcacagacttcgggctgtgcaaggaggggatcaaggacggtgccaccatgaagaccttttgcggcacacctgagtacctggcccccgaggtgctggaggacaatgactacggccgtgcagtggactggtgggggctgggcgtggtcatgtacgagatgatgtgcggtcgcctgcccttctacaaccaggaccatgagaagctttttgagctcatcctcatggaggagatccgcttcccgcgcacgcttggtcccgaggccaagtccttgctttcagggctgctcaagaaggaccccaagcagaggcttggcgggggctccgaggacgccaaggagatcatgcagcatcgcttctttgccggtatcgtgtggcagcacgtgtacgagaagaagctcagcccacccttcaagccccaggtcacgtcggagactgacaccaggtattttgatgaggagttcacggcccagatgatcaccatcacaccacctgaccaagatgacagcatggagtgtgtggacagcgagcgcaggccccacttcccccagttctcctactcggccagcggcacggcctgaggcggcggtggactgcgctggacgatagcttggagggatggagaggcggcctcgtgccatgatctgtatttaatggtttttatttctcgggtgcatttgagagaagccacgctgtcctctcgagcccagatggaaagacgtttttgtgctgtgggcagcaccctcccccgcagcggggtagggaagaaaactatcctgcgggttttaatttatttcatccagtttgttctccgggtgtggcctcagccctcagaacaatccgattcacgtagggaaatgttaaggacttctgcagctatgcgcaatgtggcattggggggccgggcaggtcctgcccatgtgtcccctcactctgtcagccagccgccctgggctgtctgtcaccagctatctgtcatctctctggggccctgggcctcagttcaacctggtggcaccagatgcaacctcactatggtatgctggccagcaccctctcctgggggtggcaggcacacagcagccccccagcactaaggccgtgtctctgaggacgtcatcggaggctgggcccctgggatgggaccagggatgggggatgggccagggtttacccagtgggacagaggagcaaggtttaaatttgttattgtgtattatgttgttcaaatgcattttgggggtttttaatctttgtgacaggaaagccctcccccttccccttctgtgtcacagttcttggtgactgtcccaccgggagcctccccctcagatgatctctccacggtagcacttgaccttttcgacgcttaacctttccgctgtcgccccaggccctccctgactccctgtgggggtggccatccctgggcccctccacgcctcctggccagacgctgccgctgccgctgcaccacggcgtttttttacaacattcaactttagtatttttactattataatataatatggaaccttccctccaaattcttcaataaaagttgcttttcaaaaaaaaaaaaaaaaaaaaaa

SEQ ID NO: 594 - DNA, 2869 bp, Homo sapiens
cccttctccccggcggttagtgctgagagtgcggagtgtgtgctccgggctcggaacacacatttattattaaaaaatccaaaaaaaatctaaaaaaatcttttaaaaaaccccaaaaaaatttacaaaaaatccgcgtctcccccgccggagacttttattttttttcttcctcttttataaaataacccggtgaagcagccgagaccgacccgcccgcccgcggccccgcagcagctccaagaaggaaccaagagaccgaggccttcccgctgcccggacccgacaccgccaccctcgctccccgccggcagccggcagccagcggcagtggatcgaccccgttctgcggccgttgagtagttttcaattccggttgatttttgtccctctgcgcttgctccccgctcccctccccccggctccggcccccagccccggcactcgctctcctcctctcacggaaaggtcgcggcctgtggccctgcgggcagccgtgccgagatgaaccccagtgcccccagctaccccatggcctcgctctacgtgggggacctccaccccgacgtgaccgaggcgatgctctacgagaagttcagcccggccgggcccatcctctccatccgggtctgcagggacatgatcacccgccgctccttgggctacgcgtatgtgaacttccagcagccggcggacgcggagcgtgctttggacaccatgaattttgatgttataaagggcaagccagtacgcatcatgtggtctcagcgtgatccatcacttcgcaaaagtggagtaggcaacatattcattaaaaatctggacaaatccattgataataaagcactgtatgatacattttctgcttttggtaacatcctttcatgtaaggtggtttgtgatgaaaatggttccaagggctatggatttgtacactttgagacgcaggaagcagctgaaagagctattgaaaaaatgaatggaatgctcctaaatgatcgcaaagtatttgttggacgatttaagtctcgtaaagaacgagaagctgaacttggagctagggcaaaagaattcaccaatgtttacatcaagaattttggagaagacatggatgatgagcgccttaaggatctctttggcaagtttgggcctgccttaagtgtgaaagtaatgactgatgaaagtggaaaatccaaaggatttggatttgtaagctttgaaaggcatgaagatgcacagaaagctgtggatgagatgaacggaaaggagctcaatggaaaacaaatttatgttggtcgagctcagaaaaaggtggaacggcagacggaacttaagcgcaaatttgaacagatgaaacaagataggatcaccagataccagggtgttaatctttatgtgaaaaatcttgatgatggtattgatgatgaacgtctccggaaagagttttctccatttggtacaatcactagtgcaaaggttatgatggagggtggtcgcagcaaagggtttggttttgtatgtttctcctccccagaagaagccactaaagcagttacagaaatgaacggtagaattgtggccacaaagccattgtatgtagctttagctcagcgcaaagaagagcgccaggctcacctcactaaccagtatatgcagagaatggcaagtgtacgagctgttcccaaccctgtaatcaacccctaccagccagcacctccttcaggttacttcatggcagctatcccacagactcagaaccgtgctgcatactatcctcctagccaaattgctcaactaagaccaagtcctcgctggactgctcagggtgccagacctcatccattccaaaatatgcccggtgctatccgcccagctgctcctagaccaccatttagtactatgagaccagcttcttcacaggttccacgagtcatgtcaacacagcgtgttgctaacacatcaacacagacaatgggtccacgtcctgcagctgcagccgctgcagctactcctgctgtccgcaccgttccacagtataaatatgctgcaggagttcgcaatcctcagcaacatcttaatgcacagccacaagttacaatgcaacagcctgctgttcatgtacaaggtcaggaacctttgactgcttccatgttggcatctgcccctcctcaagagcaaaagcaaatgttgggtgaacggctgtttcctcttattcaagccatgcaccctactcttgctggtaaaatcactggcatgttgttggagattgataattcagaacttcttcatatgctcgagtctccagagtcactccgttctaaggttgatgaagctgtagctgtactacaagcccaccaagctaaagaggctgcccagaaagcagttaacagtgccaccggtgttccaactgtttaaaattgatcagggaccatgaaaagaaacttgtgcttcaccgaagaaaaatatctaaacatcgaaaaacttaaatattatggaaaaaaaacattgcaaaatataaaataaataaaaaaaggaaaggaaactttgaaccttatgtaccgagcaaatgccaggtctagcaaacataatgctagtcctagattacttattgatttaaaaacaaaaaaacacaaaaaaatagtaaaatataaaaacaaattaatgttttatagaccctgggaaaaagaattttcagcaaagtacaaaaatttaaagcattcctttctttaattttgtaattctttactgtggaatagctcagaatgtcagttctgttttaagtaacagaattgataactgagcaaggaaacgtaatttggattataaaattcttgctttaataaaaattccttaaacagtgaaaaaaaaa

SEQ ID NO: 595 - DNA, 2780 bp, Homo sapiens
gtgggcggaccgcgcggctggaggtgtgaggatccgaacccaggggtggggggtggaggcggctcctgcgatcgaaggggacttgagactcaccggccgcacgccatgagggccctgtgggtgctgggcctctgctgcgtcctgctgaccttcgggtcggtcagagctgacgatgaagttgatgtggatggtacagtagaagaggatctgggtaaaagtagagaaggatcaaggacggatgatgaagtagtacagagagaggaagaagctattcagttggatggattaaatgcatcacaaataagagaacttagagagaagtcggaaaagtttgccttccaagccgaagttaacagaatgatgaaacttatcatcaattcattgtataaaaataaagagattttcctgagagaactgatttcaaatgcttctgatgctttagataagataaggctaatatcactgactgatgaaaatgctctttctggaaatgaggaactaacagtcaaaattaagtgtgataaggagaagaacctgctgcatgtcacagacaccggtgtaggaatgaccagagaagagttggttaaaaaccttggtaccatagccaaatctgggacaagcgagtttttaaacaaaatgactgaagcacaggaagatggccagtcaacttctgaattgattggccagtttggtgtcggtttctattccgccttccttgtagcagataaggttattgtcacttcaaaacacaacaacgatacccagcacatctgggagtctgactccaatgaattttctgtaattgctgacccaagaggaaacactctaggacggggaacgacaattacccttgtcttaaaagaagaagcatctgattaccttgaattggatacaattaaaaatctcgtcaaaaaatattcacagttcataaactttcctatttatgtatggagcagcaagactgaaactgttgaggagcccatggaggaagaagaagcagccaaagaagagaaagaagaatctgatgatgaagctgcagtagaggaagaagaagaagaaaagaaaccaaagactaaaaaagttgaaaaaactgtctgggactgggaacttatgaatgatatcaaaccaatatggcagagaccatcaaaagaagtagaagaagatgaatacaaagctttctacaaatcattttcaaaggaaagtgatgaccccatggcttatattcactttactgctgaaggggaagttaccttcaaatcaattttatttgtacccacatctgctccacgtggtctgtttgacgaatatggatctaaaaagagcgattacattaagctctatgtgcgccgtgtattcatcacagacgacttccatgatatgatgcctaaatacctcaattttgtcaagggtgtggtggactcagatgatctccccttgaatgtttcccgcgagactcttcagcaacataaactgcttaaggtgattaggaagaagcttgttcgtaaaacgctggacatgatcaagaagattgctgatgataaatacaatgatactttttggaaagaatttggtaccaacatcaagcttggtgtgattgaagaccactcgaatcgaacacgtcttgctaaacttcttaggttccagtcttctcatcatccaactgacattactagcctagaccagtatgtggaaagaatgaaggaaaaacaagacaaaatctacttcatggctgggtccagcagaaaagaggctgaatcttctccatttgttgagcgacttctgaaaaagggctatgaagttatttacctcacagaacctgtggatgaatactgtattcaggcccttcccgaatttgatgggaagaggttccagaatgttgccaaggaaggagtgaagttcgatgaaagtgagaaaactaaggagagtcgtgaagcagttgagaaagaatttgagcctctgctgaattggatgaaagataaagcccttaaggacaagattgaaaaggctgtggtgtctcagcgcctgacagaatctccgtgtgctttggtggccagccagtacggatggtctggcaacatggagagaatcatgaaagcacaagcgtaccaaacgggcaaggacatctctacaaattactatgcgagtcagaagaaaacatttgaaattaatcccagacacccgctgatcagagacatgcttcgacgaattaaggaagatgaagatgataaaacagttttggatcttgctgtggttttgtttgaaacagcaacgcttcggtcagggtatcttttaccagacactaaagcatatggagatagaatagaaagaatgcttcgcctcagtttgaacattgaccctgatgcaaaggtggaagaagagcccgaagaagaacctgaagagacagcagaagacacaacagaagacacagagcaagacgaagatgaagaaatggatgtgggaacagatgaagaagaagaaacagcaaaggaatctacagctgaaaaagatgaattgtaaattatactctcaccatttggatcctgtgtggagagggaatgtgaaatttacatcatttctttttgggagagacttgttttggatgccccctaatccccttctcccctgcactgtaaaatgtgggattatgggtcacaggaaaaagtgggttttttagttgaattttttttaacattcctcatgaatgtaaatttgtactatttaactgactattcttgatgtaaaatcttgtcatgtgtataaaaataaaaaagatcccaaat

SEQ ID NO: 596 - DNA, 2963 bp, Homo sapiens
ggtctggatccagctgctgttccaggagagcaaccctggggtgcactacgagtacaccatccacagggaggcaggtggccacgacgaggtcccgccgcccgtgttctcctggcattatgggccctggaccaagtgcacagtcacctgcggcagaggtgtgcagaggcagaatgtgtactgcttggagcggcaggcagggcccgtggacgaggagcactgtgaccccctgggccggcctgatgaccaacagaggaagtgcagcgagcagccctgccctgccaggtggtgggcaggtgagtggcagctgtgctccagctcctgcgggcctgggggcctctcccgccgggccgtgctctgcatccgcagcgtggggctggatgagcagagcgccctggagccacccgcctgtgaacaccttccccggccccctactgaaaccccttgcaaccgccatgtaccctgtccggccacctgggctgtggggaactggtctcagtgctcagtgacatgtggggagggcactcagcgccgaaatgtcctctgcaccaatgacaccggtgtcccctgtgacgaggcccagcagccagccagcgaagtcacctgctctctgccactctgtcggtggcccctgggcacactgggccctgaaggctcaggcagcggctcctccagccacgagctcttcaacgaggctgacttcatcccgcaccacctggccccacgcccttcacccgcctcatcacccaagccaggcaccatgggcaacgccattgaggaggaggctccagagctggacctgccggggcccgtgtttgtggacgacttctactacgactacaatttcatcaatttccacgaggatctgtcctacgggccctctgaggagcccgatctagacctggcggggacaggggaccggacacccccaccacacagccgtcctgctgcgccctccacgggtagccctgtgcctgccacagagcctcctgcagccaaggaggagggggtactgggaccttggtccccgagcccttggcctagccaggccggccgctccccacccccaccctcagagcagacccctgggaaccctttgatcaatttcctgcctgaggaagacacccccataggggccccagatcttgggctccccagcctgtcctggcccagggtttccactgatggcctgcagacacctgccacccctgagagccaaaatgatttcccagttggcaaggacagccagagccagctgccccctccatggcgggacaggaccaatgaggttttcaaggatgatgaggaacccaagggccgcggagcaccccacctgcccccgagacccagctccacgctgccccctttgtcccctgttggcagcacccactcctctcctagtcctgacgtggcggagctgtggacaggaggcacagtggcctgggagccagctctggagggtggcctggggcctgtggacagtgaactgtggcccactgttggggtggcttctctccttcctcctcccatagcccctctgccagagatgaaggtcagggacagttccctggagccggggactccctccttcccagccccaggaccaggctcatgggacctgcagactgtggcagtgtgggggaccttcctccccacaaccctgactggcctcgggcacatgcctgagcctgccctgaacccaggacccaagggtcagcctgagtccctcagccctgaggtgcccctgagctctaggctgctgtccacaccagcttgggacagccccgccaacagccacagagtccctgagacccagccgctggctcccagcctggctgaagcggggccccccgcggacccgttggttgtcaggaacgccagctggcaagcgggaaactggagcgagtgctctaccacctgtggcctgggtgcggtctggaggccggtgcgctgtagctccggccgggatgaggactgcgcccccgctggccggccccagcctgcccgccgctgccacctgcggccctgtgccacctggcactcaggcaactggagtaagtgctcccgcagctgcggcggaggttcctcagtgcgggacgtgcagtgtgtggacacacgggacctccggccactgcggcccttccattgtcagcccgggcctgccaagccgcctgcgcaccggccctgcggggcccagccctgcctcagctggtacacatcttcctggagggagtgctccgaggcctgtggcggtggtgagcagcagcgtctagtgacctgcccggagccaggcctctgcgaggaggcgctgagacccaacaccacccggccctgcaacacccacccctgcacgcagtgggtggtggggccctggggccagtgctcagccccctgtggtggtggtgtccagcggcgcctggtcaagtgtgtcaacacccagacagggctgcccgaggaagacagtgaccagtgtggccacgaggcctggcctgagagctcccggccgtgtggcaccgaggattgtgagcccgtcgagcctccccgctgtgagcgggaccgcctgtccttcgggttctgcgagacgctgcgcctactgggccgctgccagctgcccaccatccgcacccagtgctgccgctcgtgctctccgcccagccacggcgccccctcccgaggccatcagcgggttgcccgccgctgactgtgccaggatgcacagaccgaccgacagacctcagtgcccaccacgggctgtggcggagctcccgccccctgcgccctaatggtgctaaccccctctcactacccagcagcaggctggggacctcctccccctcaaaaaaggtatttttttattctaacagtttgtgtaacatttattatgattttacataaatgagcatctaccattccaaagcaaaaaaaaaaaaaaaaaaaaaaaaaaaaaaaaaaaaaaaaaaaaaaaa

SEQ ID NO: 597 - DNA, 1906 bp, Homo sapiens
cctagccactgggctgggatcttctgggtcatgtgactgtgtatccaggagcagaaacttgtattctcaggattcaggatctacccagcaccaaagatgtattttcaggagaacagacctagaaatgggcctgtctggcatttccagagtcaagccaaaagcaggcagggccagggagcttctgtgggtctacacaagaaggttcctgtgagggctatcagttgttgccttctagcttgctggtaactttgcgcctccgccaagccctgccagactcccctggctgtgatggcattctgtgccatcctccttgtccccagcctctgcaggatgccctccttacccacctctccctgggccttccctgtccactgggctggattcatgttcaaaccactggactggcagggcaacgacttcttcccacctcaagatgaggtcctcgccccttgtcttggcataaaaacacctttaaagcatgagccatgtgcttctttgcccttttctgtcctgttccaatcttctgcctcccagtcactcctggggactatgggatcactgtccccccacctgtgtggccacaccatgtgtcctgtcaatccagaactgcctctgagcttccaggctgaccacagatcagcacagcctgatgcctgcagcccactttgtcacccttcctcccttcttccttccttccacacagcaagcctacctttctccatccatgctcaccatagcccccttccttgtgacctggaccctccattgtacctggctgagactgtcagcctcctggaggagtggggtccaccttcttcttgccctatgcagtgcaagctcacttctcacccagcaaggttgactcatctgcctccatgtctctggggctttgctgttgccctgaaacctagctgggctggtcttgctcccagcttgcttccccctcctcggatgtccctttgcaggcccctgtcgttcctccggcaccagtgtccttggctgccatggcaagctcatcaggggcttgtaccctggtcaccaagcatggtagcagctgcctgcattgtatctccatctggtcactgcaggtgccaacccttcatcccccatgttttcctgggccatggagggctgacctccgtttctggggaatgtggctgagctgtggtaaccagctacaccccaggtgctctttccatggtggtgcctgctcatcttgctgatgcaaactaggaagttaggctgcatctcggagtggctttcgctggagaggtgctttgctgtctctcagactcagtcactgtgttccctccccgcctctcttatctccatggctgtttgcagctctcccaggtactttggggtctgagctggaattcctttgtggtttgctcttctgcttctcactcttgtattaagaaggattccacaaagggagagtggcatccctgctgctgctgtgccagaccagagtttcctgaggggccctgaccctaaccctccagctcagccctgtacacctgaccctgtaaatgagtggggtttgctgactgtaatccctgacaccagtaaaaccaaaaggactcttgggggctcagtgtgagagccagggttacctactctgccaagtgaggacaaactgctaggctgtatcccataatttcaggatgagaaacattaacaataaaaatttgtagtaacataacctcatgaagaactagaaaagaaaagaaaagagatcttatttagcggcgcagctatcccttagtgaggtattagctgcactgcggcgtttcacgtctgatggcgacttgcgtacgacttactgcttagaatctcttgcagctgtatacgaaggccgatcgtctcaagtcgtgatgatgggccgctttcggatagggggttt

SEQ ID NO: 598 - DNA, 4361 bp, Homo sapiens
tcgtggggcgggggtggggcgggactgagggcggagtgtgagcgggctcggttttgggccgcggcgggagcgggagtcgccgccactcgagtgcgcaggcgcctggcgattaccggtctcaccatggagcggaaagtgcttgcgctccaggcccgaaagaaaaggaccaaggccaagaaggacaaagcccaaaggaaatctgaaactcagcaccgaggctctgctccccactctgagagtgatctaccagagcaggaagaggagattctgggatctgatgatgatgagcaagaagatcctaatgattattgtaaaggaggttatcatcttgtgaaaattggagatctattcaatgggagataccatgtgatccgaaagttaggctggggacacttttcaacagtatggttatcatgggatattcaggggaagaaatttgtggcaatgaaagtagttaaaagtgctgaacattacactgaaacagcactagatgaaatccggttgctgaagtcagttcgcaattcagaccctaatgatccaaatagagaaatggttgttcaactactagatgactttaaaatatcaggagttaatggaacacatatctgcatggtatttgaagttttggggcatcatctgctcaagtggatcatcaaatccaattatcaggggcttccactgccttgtgtcaaaaaaattattcagcaagtgttacagggtcttgattatttacataccaagtgccgtatcatccacactgacattaaaccagagaacatcttattgtcagtgaatgagcagtacattcggaggctggctgcagaagcaacagaatggcagcgatctggagctcctccgccttccggatctgcagtcagtactgctccccagcctaaaccagctgacaaaatgtcaaagaataagaagaagaaattgaagaagaagcagaagcgccaggcagaattactagagaagcgaatgcaggaaattgaggaaatggagaaagagtcgggccctgggcaaaaaagaccaaacaagcaagaagaatcagagagtcctgttgaaagacccttgaaagagaacccacctaataaaatgacccaagaaaaacttgaagagtcaagtaccattggccaggatcaaacgcttatggaacgtgatacagagggtggtgcagcagaaattaattgcaatggagtgattgaagtcattaattatactcagaacagtaataatgaaacattgagacataaagaggatctacataatgctaatgactgtgatgtccaaaatttgaatcaggaatctagtttcctaagctcccaaaatggagacagcagcacatctcaagaaacagactcttgtacacctataacatctgaggtgtcagacaccatggtgtgccagtcttcctcaactgtaggtcagtcattcagtgaacaacacattagccaacttcaagaaagcattcgggcagagataccctgtgaagatgaacaagagcaagaacataacggaccactggacaacaaaggaaaatccacggctggaaattttcttgttaatccccttgagccaaaaaatgcagaaaagctcaaggtgaagattgctgaccttggaaatgcttgttgggtgcacaaacatttcactgaagatattcaaacaaggcaatatcgttccttggaagttctaatcggatctggctataatacccctgctgacatttggagcacggcatgcatggcctttgaactggccacaggtgactatttgtttgaacctcattcaggggaagagtacactcgagatgaagatcacattgcattgatcatagaacttctggggaaggtgcctcgcaagctcattgtggcaggaaaatattccaaggaatttttcaccaaaaaaggtgacctgaaacatatcacgaagctgaaaccttggggcctttttgaggttctagtggagaagtatgagtggtcgcaggaagaggcagctggcttcacagatttcttactgcccatgttggagctgatccctgagaagagagccactgccgccgagtgtctccggcacccttggcttaactcctaagcccctgcccagcaccacagcagagatcacacactgaccctccgcccttccccttcaagcattttcctcttcccttttcagggtgaagctcttccttcaagagtttctagatcttgttttttttttaatccaacatgttcatttgggtttgcttacttgaccctgtggagatccccacagccattgggcatcctaggtgaatttggccttggttgggctctgccaaagactaatggactaaaatgtgaaacagcctcttgccctgtacctttccttcccattaggacatcctttaaattataagcatcctttttgaaaagagctatgaaggtgtatgagcccatccttttattcattgactctaagagtcaaattttctagtgcatatcctattgccagcataaggatgaggagggggaaagggtcttaattctatgtacagcagagacattaaacttgctgtgtccgggctgcatcatcttcctggactgtttctgttgttctctgtgttcacattttttcctgcaacttttaagctactgtcttttttaaatagctatatgaacaccaaatttgggtaccattttatcactgttcaaagcactgtcaaattcctttcatcctttaatagttaagatctttgaatcttcagtctgatttttaatgtaagcaaaaacagaaccattgaatagtaatttcttgagaacctcaggtgttctataaacagtcctttcctgtatgtcttctattaccctaagaccagagttattttggttggttgttttgttttattttttgtttttgtatccatggctggcactttactcattgcacttgagtttattgccccataactaaaggatcaggatgatggtagaacggagatctgggtttcagagctttcccatttaagaaaaatagatcttgagattctaattcttttccaaacagtcccctgctttcatgtacagctttttctttaccttacccaaaattctggccttgaagcagttttcctctatggctttgcctttctgattttctcagaggctcgagtctttaatataaccccaaatgaaagaaccaaggggaggggtgggatggcacttttttttgttggtcttgttttgttttgttttttggttggttggttcgttattttttaagattagccattctctgctgctatttccctacataatgtcaatttttaaccataattttgacatgattgagatgtacttgaggcttttttgttttaattgagaaaagactttgcaattttttttttaggatgagcctctcctagacttgacctagaatattacatattcctccagtaagtaatactgaagagcaaaagagaggcaggattggggtcacagccgcttcttcagcatggaccaagtgggccttggggattgcagcgttctcgaagtggctgtaggactcgaatttacagaaagccacagaggtgcaacttgaggctctgctagcaagccaccagtgaggctattgggtaaccacctttctatacaggagattggaatctactttgtcatttatccaccacagtgacaaaggaaaagtggtgccgttatgcaatccatttaactcataaacatattactctgagtaactggccagccattcatcggatccttcattgggtactcctgaaatcagacatgttcctgtagaaagaattttaagttaggctttctatgcacctatcaagaatcaagagaatagattgtatcaaacaacggcagggaaatccttcagcaattctaatccactttgggttttcagctgtttttacatctaaagcaatagactagaactgaattatcttctacatagtaaaatcacaattgtggaattacaggaattctggtgatattaaggtgaaataacaaaacacaaaaggccctattttaacagttgatgtgacagtaagttttaatagaacctgtaacttcattttggaaatgcttctccaccaaataagggctttttcccctatttaaggagccagatggattgaaagatgtggaaataggcagctgtagatcttgatcttccaggtaccccatgtacctttattgagcttaattataatactgtcaaattgccacgatctcactaaaggatttctatttgctgtcagttaaaaataaagccctaaatacatttttattctttctactgagggcattgtctgttttctttgtaaatgccgtacaataaacaaattatttaataaccta

SEQ ID NO: 599 - DNA, 1974 bp, Homo sapiens
ggttccgcggggctggcgggcgagcgggcggccgggatcggcggcggcggcggcggcggcggcgcttgacagacaatgagggcggcggggcggcgttgagcggcggcggcggcggcggcggcggcgagcgacgcggggcccgggggcggggcggggcgccagccatggacaatcagtgcaccgtccaggtgaggttagagctggggcatcgcgcccaactgcgcaagaagcccaccacggaggggttcactcacgactggatggtgtttgtccgcggccccgagcaatgtgacatccagcacttcgtggagaaggtggtcttctggctgcacgacagcttccccaagcccagacgcgtgtgcaaggagcccccctacaaagtagaggagtcggggtacgctggcttcatcatgcccatcgaggtgcacttcaaaaacaaggaggagccgaggaaggtctgcttcacctacgacctgttcctgaacctggaaggcaacccgcccgtgaaccacctgcgctgcgagaagctcaccttcaacaaccccaccacggagttccggtacaagctcctgcgggccggcggggtgatggtaatgcccgaaggagcagacacggtgtccaggcccagtcccgactaccccatgttacccacaattccactctctgccttctctgaccccaagaagaccaaaccatcccacggctccaaggacgccaacaaggagagcagcaagacctccaagccacacaaggtgaccaaggagcaccgggagcggccccgcaaagactccgagagcaagagctcctccaaggagctggagcgtgagcaggccaaaagctccaaggacacctcgcggaagctgggcgagggccggctgcccaaggaggagaaggcgccaccgcccaaggctgccttcaaggaacccaagatggccctgaaagagaccaagctggaaagcacgtcccccaagggtgggcccccacccccacccccacccccaccccgggcttccagcaagcggccggccaccgccgactcgccaaagcccagcgccaagaagcagaagaagagcagctcgaaggggtcccggagtgctccaggcacctcgccccgcacctcctcctcctcctccttctcggacaagaagccggccaaggacaagagcagcaccagaggggagaaggtgaaggccgagagtgagccccgggaggccaaaaaggccctggaggtggaggagtccaactcagaggacgaggcctccttcaagtccgagtctgcccagtcaagcccgtccaactccagctccagctcagactccagctcagactcagacttcgagccatcccagaaccacagccaaggacccctgcgctccatggtggaggacctgcagtccgaggagtccgacgaggacgactcttcgtcaggcgaggaggctgccggcaagaccaacccggggagggactccaggttgagcttcagcgacagcgagagtgacaacagcgccgactcctccctgcccagccgtgagcccccacccccccagaagccacccccgcccaacagcaaggtgtcaggccggaggagccccgagtcctgcagcaagcctgagaagatcctcaagaagggcacctacgacaaggcctacacggatgagctggtggagctacaccggaggctgatggcgctgcgggagcgcaacgtgctgcagcagattgtgaatctgatcgaggagactggccacttcaatgtcaccaacaccaccttcgacttcgacctcttctccctggacgagaccaccgtgcgcaaactgcagagctgcctggaggccgtggccacatgaccctgggccgcgtgccgggcccccaccgccggggtcctgggaggctgcagccaggcctcgcctgccctcctctcccgtctcgcctgcttcatttggatatcagagctatggctcagaaaagcaagcatct

SEQ ID NO: 600 - DNA, 4853 bp, Homo sapiens
ttcgccgtttgaattgctgcgggcccgggccctcacctcacctgaggtccggccgcccaggggtgcgctatgccgtcgggaggtgaccagtcgccaccgcccccgcctccccctccggcggcggcagcctcggatgaggaggaggaggacgacggcgaggcggaagacgccgcgccgtctgccgagtcgcccacccctcagatccagcagcggttcgacgagctgtgcagccgcctcaacatggacgaggcggcgcggcccgaggcctgggacagctaccgcagcatgagcgaaagctacacgctggagggaaatgatcttcattggttagcatgtgccttatatgtggcttgcagaaaatctgttccaactgtaagcaaagggacagtggaaggaaactatgtatctttaactagaatcctgaaatgttcagagcagagcttaatcgaattttttaataagatgaagaagtgggaagacatggcaaatctacccccacatttcagagaacgtactgagagattagaaagaaacttcactgtttctgctgtaatttttaagaaatatgaacccatttttcaggacatctttaaataccctcaagaggagcaacctcgtcagcagcgaggaaggaaacagcggcgacagccctgtactgtgtctgaaattttccatttttgttgggtgctttttatatatgcaaaaggtaatttccccatgattagtgatgatttggtcaattcttatcacctgctgctgtgtgctttggacttagtttatggaaatgcacttcagtgttctaatcgtaaagaacttgtgaaccctaattttaaaggcttatctgaagattttcatgctaaagattctaaaccttcctctgaccccccttgtatcattgagaaactgtgttccttacatgatggcctagttttggaagcaaaggggataaaggaacatttctggaaaccctatattaggaaactttatgaaaaaaagctccttaagggaaaagaagaaaatctcactgggtttctagaacctgggaactttggagagagttttaaagccatcaataaggcctatgaggagtatgttttatctgttgggaatttagatgagcggatatttcttggagaggatgctgaggaggaaattgggactctctcaaggtgtctgaacgctggttcaggaacagagactgctgaaagggtgcagatgaaaaacatcttacagcagcattttgacaagtccaaagcacttagaatctccacaccactaactggtgttaggtacattaaggagaatagcccttgtgtgactccagtttctacagctacgcatagcttgagtcgtcttcacaccatgctgacaggcctcaggaatgcaccaagtgagaaactggaacagattctcaggacatgttccagagatccaacccaggctattgctaacagactgaaagaaatgtttgaaatatattctcagcatttccagccagacgaggatttcagtaattgtgctaaagaaattgccagcaaacattttcgttttgcggagatgctttactataaagtattagaatctgttattgagcaggaacaaaaaagactaggagacatggatttatctggtattctggaacaagatgcattccacagatctctcttggcctgctgccttgaggtcgtcactttttcttataagcctcctgggaattttccatttattactgaaatatttgatgtgcctctttatcatttttataaggtgatagaagtattcattagagcagaagatggcctttgtagagaggtggtaaaacaccttaatcagattgaagaacagatcttagatcatttggcatggaaaccagagtctccactctgggaaaaaattagagacaatgaaaacagagttcctacatgtgaagaggtcatgccacctcagaacctggaaagggcagatgaaatttgcattgctggctcccctttgactcccagaagggtgactgaagttcgtgctgatactggaggacttggaaggagcataacatctccaaccacattatacgataggtacagctccccaccagccagcactaccagaaggcggctatttgttgagaatgatagcccctctgatggagggacgcctgggcgcatgcccccacagcccctagtcaatgctgtccctgtgcagaatgtatctggggagactgtttctgtcacaccagttcctggacagactttggtcaccatggcaaccgccactgtcacagccaacaatgggcaaacggtaaccattcctgtgcaaggtattgccaatgaaaatggagggataacattcttccctgtccaagtcaatgttggggggcaggcacaagctgtgacaggctccatccagcccctcagtgctcaggccctggctggaagtctgagctctcaacaggtgacaggaacaactttgcaagtccctggtcaagtggccattcaacagatttccccaggtggccaacagcagaagcaaggccagtctgtaaccagcagtagtaatagacccaggaagaccagctctttatcgcttttctttagaaaggtataccatttagcagctgtccgccttcgggatctctgtgccaaactagatatttcagatgaattgaggaaaaaaatctggacctgctttgaattctccataattcagtgtcctgaacttatgatggacagacatctggaccagttattaatgtgtgccatttatgtgatggcaaaggtcacaaaagaagataagtccttccagaacattatgcgttgttataggactcagccgcaggcccggagccaggtgtatagaagtgttttgataaaagggaaaagaaaaagaagaaattctggcagcagtgatagcagaagccatcagaattctccaacagaactaaacaaagatagaaccagtagagactccagtccagttatgaggtcaagcagcaccttgccagttccacagcccagcagtgctcctcccacacctactcgcctcacaggtgccaacagtgacatggaagaagaggagaggggagacctcattcagttctacaacaacatctacatcaaacagattaagacatttgccatgaagtactcacaggcaaatatggatgctcctccactctctccctatccatttgtaagaacaggctcccctcgccgaatacagttgtctcaaaatcatcctgtctacatttccccacataaaaatgaaacaatgctttctcctcgagaaaagattttctattacttcagcaacagtccttcaaagagactgagagaaattaatagtatgatacgcacaggagaaactcctactaaaaagagaggaattcttttggaagatggaagtgaatcacctgcaaaaagaatttgcccagaaaatcattctgccttattacgccgtctccaagatgtagctaatgaccgtggttcccactgaggttagtctcttgtattaaactcttcacaaaatctgtttagcagcagcctttaatgcatctagattatggagcttttttccttaatccagctgatgagttacagcctgttagtaacatgaggggacattttggtgagaaatgggacttaactccttccagtgtccttagaacattttaattcatcccaactgtctttttttccctaccactcagtgattactgtcaaggctgcttacaatccaaacttgggtttttggctctggcaaagcttttagaaatactgcaagaaatgatgtgtacccaacgtgagcataggaggcttctgttgacgtctccaacagaagaactgtgtttcaagttcaatcctacctgttttgtggtcagctgtagtcctcataaaaagcaaaacaaaaattaggtattttgtcctaaaacacctggtaggagtgtgtgattttttgcattcctgacaaaggagagcacacccaggtttggaggtcctaggtcattagccctcgtctcccgttccctttgtgcacatcttccctctccccattcggtgtggtgcagtgtgaaaagtccttgattgttcgggtgtgcaatgtctgagtgaacctgtataagtggaggcactttagggctgtaaaatgcatgattttgtaacccagattttgctgtatatttgtgatagcactttctacaatgtgaactttattaaatacaaaacttccaggctaaacatccaatattttctttaatgcttttatatttttttaaaatgttaaaacccctatagccaccttttgggaatgttttaaattctccagttttttgttatatagggatcaaccagctaagaaaagattttaagtcaagttgaattgaggggattaatatgaaaacttatgacctcttcctttaggagggagttatctaaaagaaatgtctattaaggtgatatatttaaaaatatttttgggtgttcctggcagtttaaaaaaattggttggagaatttaggtttttattagtaccatagtaccatttatacaaattagaaaatgttatttaacagctgaattatctatacatatctttattaatcactattgttccagcagttttcaagtcaaattaataatcttattagggagaaaattcaattgtaaattgaatcagtataaacaaagttactaggtaacttcatattgctgagagaaatatggaacttacattgttcaattagaatagtgttctccccaaatatttataaaacttctcaagatactgctacgtgtaattttatatgaagataagtgtatttttcaataaagcatttataaattaaaaaaaaaaaaaaaaaa

SEQ ID NO: 601 - DNA, 154 bp, Homo sapiens
  misc_feature (144)..(144): n is a, c, g, or t
atatttattattttattgctacattggaagtgaaaataaactgtaagaagctgccaaaggatgcaacttcatgaagattatgaaactattgaggcacccattgtagaaagttaaaattggcttatcctgcatgaggtggaagcnaaggcctccc

SEQ ID NO: 602 - DNA, 1837 bp, Homo sapiens
gagccgcgcacgggactgggaaggggacccacccgagggtccagccaccagccccctcactaatagcggccaccccggcagcggcggcagcagcagcagcgacgcagcggcgacagctcagagcagggaggccgcgccacctgcgggccggccggagcgggcagccccaggccccctccccgggcacccgcgttcatgcaacgcctggtggcctgggacccagcatgtctccccctgccgccgccgccgcctgcctttaaatccatggaagtggccaacttctactacgaggcggactgcttggctgctgcgtacggcggcaaggcggcccccgcggcgccccccgcggccagacccgggccgcgcccccccgccggcgagctgggcagcatcggcgaccacgagcgcgccatcgacttcagcccgtacctggagccgctgggcgcgccgcaggccccggcgcccgccacggccacggacaccttcgaggcggctccgcccgcgcccgcccccgcgcccgcctcctccgggcagcaccacgacttcctctccgacctcttctccgacgactacgggggcaagaactgcaagaagccggccgagtacggctacgtgagcctggggcgcctgggggccgccaagggcgcgctgcaccccggctgcttcgcgcccctgcacccaccgcccccgccgccgccgccgcccgccgagctcaaggcggagccgggcttcgagcccgcggactgcaagcggaaggaggaggccggggcgccgggcggcggcgcaggcatggcggcgggcttcccgtacgcgctgcgcgcttacctcggctaccaggcggtgccgagcggcagcagcgggagcctctccacgtcctcctcgtccagcccgcccggcacgccgagccccgctgacgccaaggcgcccccgaccgcctgctacgcgggggccgcgccggcgccctcgcaggtcaagagcaaggccaagaagaccgtggacaagcacagcgacgagtacaagatccggcgcgagcgcaacaacatcgccgtgcgcaagagccgcgacaaggccaagatgcgcaacctggagacgcagcacaaggtcctggagctcacggccgagaacgagcggctgcagaagaaggtggagcagctgtcgcgcgagctcagcaccctgcggaacttgttcaagcagctgcccgagcccctgctcgcctcctccggccactgctagcgcggcccccgcgcgcgtccccctgccggccggggctgagactccggggagcgcccgcgcccgcgccctcgcccccgcccccggcggcgccggcaaaactttggcactggggcacttggcagcgcggggagcccgtcggtaattttaatattttattatatatatatatctatatttttgtccaaaccaaccgcacatgcagatggggctcccgcccgtggtgttatttaaagaagaaacgtctatgtgtacagatgaatgataaactctctgcttctccctctgcccctctccaggcgccggcgggcgggccggtttcgaagttgatgcaatcggtttaaacatggctgaacgcgtgtgtacacgggactgacgcaacccacgtgtaactgtcagccgggccctgagtaatcgcttaaagatgttcctacgggcttgttgctgttgatgttttgttttgttttgttttttggtctttttttgtattataaaaaataatctatttctatgagaaaagaggcgtctgtatattttgggaatcttttccgtttcaagcattaagaacacttttaataaacttttttttgagaatggttacaaagcc

SEQ ID NO: 603 - DNA, 3984 bp, Homo sapiens
taggaagaggcactgctgagggggcgcgaggggaacggaggccagagctgcgctgacagcagccatggcgagcggcagtggagacagcgtcacccgtcggagcgtggcatcacagtttttcactcaagaggaggggccgggcatcgatggcatgaccacctcagagagggtggtggatcttctgaaccaggcggcgctgatcaccaatgactcaaagatcacagtgctcaaacaggtccaggagctgatcatcaacaaagacccacactactggacaacttcctggatgagatcatcgcattccaagcagacaagtcaatcgaagtgcgaaaatttgtcatcggcttcatcgaggaggcatgcaagcgagacattgagttgctgctgaaactcattgcaaacctcaacatgctcttgagggacgagaatgtgaacgtggtgaagaaggctatcctcaccatgacccagctctacaaggtggccctgcagtggatggtaaagtcacgggtaattagcgagctacaggaggcctgctgggacatggtatctgccatggcgggggacatcatcctgctattggactctgacaatgacggcatccgcacccacgccatcaagtttgtggagggcctcattgtcaccctgtcaccccgcatggctgactcagagataccccgacgccaggagcatgatatcagcctggaccgcatccctcgtgaccacccctacatccagtacaacgtgctatgggaagagggcaaggcagccttggagcagctgcttaagttcatggtgcaccctgccatctcctccatcaacctgaccacagcgctgggctcccttgccaatatcgcccgccagagacccatgttcatgtctgaggtgatccaggcctatgaaactctgcatgccaacctgcccccgacgctggccaaatcgcaggtgagcagtgtgcgtaagaatctgaagctgcacctgttgagtgtgctgaagcacccggcttccttggagttccaggcccagatcaccaccctgctggtggacctgggcacacctcaggccgagatcgcccgcaacatgccgagcagcaaggacacccgcaagcggccccgcgatgactcggactccacactcaagaagatgaagctggagcccaacctgggggaggacgatgaggacaaagacttggagccaggcccgtcggggacctcgaaggcctcagcgcagatctccggccagtcagacacggacatcacagctgagttcctgcagcctctgctgacgcctgataatgtggctaatctggtcctcatcagcatggtgtacctacccgaggccatgccagcctccttccaggccatctacacccccgtggagtcagcaggcacggaagcccagatcaagcacctggctcggctcatggccacacagatgacagctgccggactgggaccaggtgtagagcagaccaaacagtgcaaggaggagcccaaggaggagaaggtggtgaagacagagagcgtcctgatcaagcggcgcctgtcagcccagggccaagccatctcggtggtgggttccctgagctccatgtcccccctggaggaagaggcaccgcaggccaagaggaggccagagcccattatccctgtcactcagccccggctggcaggcgctggtgggcgcaagaaaattttccgtctcagcgacgtgctgaagccccttaccgatgcccaggtggaagccatgaagctgggcgctgtgaagcggatcctgcgggctgagaaggctgtggcctgcagcggggcagcccaggtccgcataaagatcctggccagcctggtgacacagttcaactcgggcctgaaggcggaggtcctgtccttcatcctggaggatgtgcgggcccgcctggacctggccttcgcctggctctaccaggagtacaacgcctacctggccgcaggtgcctcgggctccctggacaagtatgaggactgcctcatccgcctgttgtctggcctgcaggagaaaccagaccagaaggatgggatcttcaccaaggttgtgctggaggcgccactcatcacagagagtgccctggaggtggtccgcaagtactgcgaggatgagagtcgcacctatctgggcatgtccacacttcgagacctgatcttcaagcgcccgtcccgccagttccagtacctgcatgtcctcctcgacctcagctcccatgagaaggacaaggtgcgctcccaggccctgctgttcatcaaacgcatgtatgagaaggagcagctgcgggagtatgtggagaaatttgccctcaactacctgcagctcctggtgcaccccaacccaccgtctgtgctgtttggagctgacaaggacacagaggtggcagcaccctggacggaggagacagtgaagcagtgtctgtacctctacctggccctcctgcctcagaaccacaagctgatccacgaactggcggccgtgtacactgaagccatcgccgacatcaagcggacggtgctgagggtcattgagcagccgatccgaggaatgggcatgaactccccggagctgctcctgctggtggaaaattgtcccaagggagcagagacactggtcacgagatgtctgcacagcctcacagacaaagtcccaccctccccagagctggtgaagcgggtccgggatctctaccacaagcgactgccagacgtccgcttcctcatcccggtgctcaatgggctggagaagaaagaggtgatccaggccctgcctaaactcatcaaactcaaccccatcgtggtgaaggaagtcttcaaccgcctgctgggcacccagcatggtgagggaaactcagccttgtccccgctgaaccctggagagctcctgatcgcattacacaacattgactccgtgaagtgcgacatgaaatccatcatcaaagccaccaacctgtgctttgcggagcggaacgtgtacacgtcagaggtgctggccgtggtgatgcagcagctgatggagcagagccccctgcccatgctgctcatgaggaccgtcatccagtccctgaccatgtacccccgcctggggggcttcgtcatgaacatcctgtcccgcctcatcatgaagcaggtgtggaagtaccccaaggtgtgggagggcttcatcaagtgctgccagcgcacaaagccccagagcttccaggtcatcctgcagctgccgccccagcagctgggagccgtctttgacaagtgcccagagctccgggagcccctgctggcccatgtccgctccttcaccccccaccagcaagctcacatccctaactccatcatgaccatcttggaggccagcggcaagcaggagccagaggccaaggaggcgcctgcggggcccttggaggaggatgatctggagcccctgaccttggccccggccccagcaccccggccccctcaggacctcatcggcctgcgactggcccaggagaaggccttaaagcggcagctggaggaggaacagaagctgaagccgggaggagtgggagccccctcctcttcctccccctctccctctccgtcggcccggccaggcccgcccccgtctgaggaagccatggatttccgggaggaggggcctgagtgcgagaccccgggcatcttcatcagcatggatgacgactcggggctgaccgaggccgcgctgttggactctagtctcgagggccccctacccaaggagacggcagcgggcgggctgaccttgaaggaggagcggagcccccagaccctcgcacctgttggagaagatgctatgaagactcccagcccggctgccgaggacgccagggaacccgaggccaaggggaacagctgacggggctcgagggggaaagggggtgggacagggactcggggctgggggacggggcggggcttgacctgcgggtgctttgccttaaaaagaaataaa

SEQ ID NO: 604 - DNA, 2097 bp, Homo sapiens
gggcgggcccaaggagggagtggaatggccgcgggcggctcgacgcagcagaggcgacgcgagatggcggcagcttcagcggcggcgatctcaggagctggtcgctgtcggctaagcaagattggagctactcgtcgtccacctccagctcgcgtaagggtggctgtgcgactgcggccatttgtggatggaacagcgggagcaagtgatcccccctgtgtgcggggcatggacagctgctctctagagattgctaactggaggaaccaccaggagactctcaaataccagtttgatgccttctatggggagaggagtactcagcaggacatctatgcaggttcagtgcagcccatcctaaggcacttgctggaagggcagaatgccagtgtgcttgcctatggacccacaggagctgggaagacgcacacaatgctgggcagcccagagcaacctggggtgatcccgcgggctctcatggacctcctgcagctcacaagggaggagggtgccgagggccggccatgggccctttctgtcaccatgtcttacctagagatctaccaggagaaggtattagacctcctggaccctgcttcgggagacctggtaatccgagaagactgccgggggaatatcctgattccgggtctctcccagaagcccatcagtagctttgctgattttgagcggcacttcctgccagccagtcgaaatcggactgtaggagccacccggctcaaccagcgctcctcccgcagtcatgctgtgctcctggtcaaggtggaccagcgggaacgtttggccccatttcgccagcgagagggaaaactctacctgattgacttggctgggtcagaggacaaccggcgcacaggcaacaagggccttcggctaaaagagagtggagccatcaacacctccctgtttgtcctgggcaaagtggtagatgcgctgaatcagggcctccctcgtgtaccttatcgggacagcaagctcactcgcctattgcaggactctctgggtggctcagcccacagtatccttattgccaacattgcccctgagagacgcttctacctagacacagtctccgcactcaactttgctgccaggtccaaggaggtgatcaatcggccttttaccaatgagagcctgcagcctcatgccttgggacctgttaagctgtctcagaaagaattgcttggtccaccagaggcaaagagagcccgaggccctgaggaagaggagattgggagccctgagcccatggcagctccagcctctgcctcccagaaactcagccccctacagaagctaagcagcatggacccggccatgctggagcgcctcctcagcttggaccgtctgcttgcctcccaggggagccagggggcccctctgttgagtaccccaaagcgagagcggatggtgctaatgaagacagtagaagagaaggacctagagattgagaggcttaagacgaagcaaaaagaactggaggccaagatgttggcccagaaggctgaggaaaaggagaaccattgtcccacaatgctccggcccctttcacatcgcacagtcacaggggcaaagcccctgaaaaaggctgtggtgatgcccctacagctaattcaggagcaggcagcatccccaaatgccgagatccacatcctgaagaataaaggccggaagagaaagctggagtccctggatgccctagagcctgaggagaaggctgaggactgctgggagctacagatcagcccggagctactggctcatgggcgccaaaaaatactggatctgctgaacgaaggctcagcccgagatctccgcagtcttcagcgcattggcccgaagaaggcccagctaatcgtgggctggcgggagctccacggccccttcagccaggtggaggacctggaacgcgtggagggcataacggggaaacagatggagtccttcctgaaggcaaacatcctgggtctcgccgccggccagcgctgtggcgcctcctgaccgtcgtctcctcactccgccttttcaaatttttgtataaccccgtgttgtgtaaatacagtttttgctccggtg

SEQ ID NO: 605 - DNA, 1610 bp, Homo sapiens
cccagagcagcgctcgccacctccccccggcctgggcagcgctcgcccggggagtccagcggtgtcctgtggagctgccgccatggccccgcggcgggcgcgcggctgccggaccctcggtctcccggcgctgctactgctgctgctgctccggccgccggcgacgcggggcatcacgtgccctccccccatgtccgtggaacacgcagacatctgggtcaagagctacagcttgtactccagggagcggtacatttgtaactctggtttcaagcgtaaagccggcacgtccagcctgacggagtgcgtgttgaacaaggccacgaatgtcgcccactggacaacccccagtctcaaatgcattagagaccctgccctggttcaccaaaggccagcgccaccctccacagtaacgacggcaggggtgaccccacagccagagagcctctccccttctggaaaagagcccgcagcttcatctcccagctcaaacaacacagcggccacaacagcagctattgtcccgggctcccagctgatgccttcaaaatcaccttccacaggaaccacagagataagcagtcatgagtcctcccacggcaccccctctcagacaacagccaagaactgggaactcacagcatccgcctcccaccagccgccaggtgtgtatccacagggccacagcgacaccactgtggctatctccacgtccactgtcctgctgtgtgggctgagcgctgtgtctctcctggcatgctacctcaagtcaaggcaaactcccccgctggccagcgttgaaatggaagccatggaggctctgccggtgacttgggggaccagcagcagagatgaagacttggaaaactgctctcaccacctatgaaactcggggaaaccagcccagctaagtccggagtgaaggagcctctctgctttagctaaagacgactgagaagaggtgcaaggaagcgggctccaggagcaagctcaccaggcctctcagaagtcccagcaggatctcacggactgccgggtcggcgcctcctgcgcgagggagcaggttctccgcattcccatgggcaccacctgcctgcctgtcgtgccttggacccagggcccagcttcccaggagagaccaaaggcttctgagcaggatttttatttcattacagtgtgagctgcctggaatacatgtggtaatgaaataaaaaccctgccccgaatcttccgtccctcatcctaactttcagttcacagagaaaagtgacatacccaaagctctctgtcaattacaaggcttctcctggcgtgggagacgtctacagggaagacaccagcgtttgggcttctaaccaccctgtctccagctgctctgcacacatggacagggacctgggaaaggtgggagagatgctgagcccagcgaatcctctccattgaaggattcaggaagaagaaaactcaactcagtgccattttacgaatatatgcgtttatatttatacttccttgtctattatatctatacattatatattatttgtattttgacattgtaccttgtataaacaaaataaaacatctattttcaatatttttaaaatgca

SEQ ID NO: 606 - DNA, 4157 bp, Homo sapiens
agcggggcggggcgccagcgctgccttttctcctgccgggtagtttcgctttcctgcgcagagtctgcggaggggctcggctgcaccggggggatcgcgcctggcagaccccagaccgagcagaggcgacccagcgcgctcgggagaggctgcaccgccgcgcccccgcctagcccttccggatcctgcgcgcagaaaagtttcatttgctgtatgccatcctcgagagctgtctaggttaacgttcgcactctgtgtatataacctcgacagtcttggcacctaacgtgctgtgcgtagctgctcctttggttgaatccccaggcccttgttggggcacaaggtggcaggatgtctcagtggtacgaacttcagcagcttgactcaaaattcctggagcaggttcaccagctttatgatgacagttttcccatggaaatcagacagtacctggcacagtggttagaaaagcaagactgggagcacgctgccaatgatgtttcatttgccaccatccgttttcatgacctcctgtcacagctggatgatcaatatagtcgcttttctttggagaataacttcttgctacagcataacataaggaaaagcaagcgtaatcttcaggataattttcaggaagacccaatccagatgtctatgatcatttacagctgtctgaaggaagaaaggaaaattctggaaaacgcccagagatttaatcaggctcagtcggggaatattcagagcacagtgatgttagacaaacagaaagagcttgacagtaaagtcagaaatgtgaaggacaaggttatgtgtatagagcatgaaatcaagagcctggaagatttacaagatgaatatgacttcaaatgcaaaaccttgcagaacagagaacacgagaccaatggtgtggcaaagagtgatcagaaacaagaacagctgttactcaagaagatgtatttaatgcttgacaataagagaaaggaagtagttcacaaaataatagagttgctgaatgtcactgaacttacccagaatgccctgattaatgatgaactagtggagtggaagcggagacagcagagcgcctgtattggggggccgcccaatgcttgcttggatcagctgcagaactggttcactatagttgcggagagtctgcagcaagttcggcagcagcttaaaaagttggaggaattggaacagaaatacacctacgaacatgaccctatcacaaaaaacaaacaagtgttatgggaccgcaccttcagtcttttccagcagctcattcagagctcgtttgtggtggaaagacagccctgcatgccaacgcaccctcagaggccgctggtcttgaagacaggggtccagttcactgtgaagttgagactgttggtgaaattgcaagagctgaattataatttgaaagtcaaagtcttatttgataaagatgtgaatgagagaaatacagtaaaaggatttaggaagttcaacattttgggcacgcacacaaaagtgatgaacatggaggagtccaccaatggcagtctggcggctgaatttcggcacctgcaattgaaagaacagaaaaatgctggcaccagaacgaatgagggtcctctcatcgttactgaagagcttcactcccttagttttgaaacccaattgtgccagcctggtttggtaattgacctcgagacgacctctctgcccgttgtggtgatctccaacgtcagccagctcccgagcggttgggcctccatcctttggtacaacatgctggtggcggaacccaggaatctgtccttcttcctgactccaccatgtgcacgatgggctcagctttcagaagtgctgagttggcagttttcttctgtcaccaaaagaggtctcaatgtggaccagctgaacatgttgggagagaagcttcttggtcctaacgccagccccgatggtctcattccgtggacgaggttttgtaaggaaaatataaatgataaaaattttcccttctggctttggattgaaagcatcctagaactcattaaaaaacacctgctccctctctggaatgatgggtgcatcatgggcttcatcagcaaggagcgagagcgtgccctgttgaaggaccagcagccggggaccttcctgctgcggttcagtgagagctcccgggaaggggccatcacattcacatgggtggagcggtcccagaacggaggcgaacctgacttccatgcggttgaaccctacacgaagaaagaactttctgctgttactttccctgacatcattcgcaattacaaagtcatggctgctgagaatattcctgagaatcccctgaagtatctgtatccaaatattgacaaagaccatgcctttggaaagtattactccaggccaaaggaagcaccagagccaatggaacttgatggccctaaaggaactggatatatcaagactgagttgatttctgtgtctgaagttcacccttctagacttcagaccacagacaacctgctccccatgtctcctgaggagtttgacgaggtgtctcggatagtgggctctgtagaattcgacagtatgatgaacacagtatagagcatgaatttttttcatcttctctggcgacagttttccttctcatctgtgattccctcctgctactctgttccttcacatcctgtgtttctagggaaatgaaagaaaggccagcaaattcgctgcaacctgttgatagcaagtgaatttttctctaactcagaaacatcagttactctgaagggcatcatgcatcttactgaaggtaaaattgaaaggcattctctgaagagtgggtttcacaagtgaaaaacatccagatacacccaaagtatcaggacgagaatgagggtcctttgggaaaggagaagttaagcaacatctagcaaatgttatgcataaagtcagtgcccaactgttataggttgttggataaatcagtggttatttagggaactgcttgacgtaggaacggtaaatttctgtgggagaattcttacatgttttctttgctttaagtgtaactggcagttttccattggtttacctgtgaaatagttcaaagccaagtttatatacaattatatcagtcctctttcaaaggtagccatcatggatctggtagggggaaaatgtgtattttattacatctttcacattggctatttaaagacaaagacaaattctgtttcttgagaagagaatattagctttactgtttgttatggcttaatgacactagctaatatcaatagaaggatgtacatttccaaattcacaagttgtgtttgatatccaaagctgaatacattctgctttcatcttggtcacatacaattatttttacagttctcccaagggagttaggctattcacaaccactcattcaaaagttgaaattaaccatagatgtagataaactcagaaatttaattcatgtttcttaaatgggctactttgtcctttttgttattagggtggtatttagtctattagccacaaaattgggaaaggagtagaaaaagcagtaactgacaacttgaataatacaccagagataatatgagaatcagatcatttcaaaactcatttcctatgtaactgcattgagaactgcatatgtttcgctgatatatgtgtttttcacatttgcgaatggttccattctctctcctgtactttttccagacacttttttgagtggatgatgtttcgtgaagtatactgtatttttacctttttccttccttatcactgacacaaaaagtagattaagagatgggtttgacaaggttcttcccttttacatactgctgtctatgtggctgtatcttgtttttccactactgctaccacaactatattatcatgcaaatgctgtattcttctttggtggagataaagatttcttgagttttgttttaaaattaaagctaaagtatctgtattgcattaaatataatatgcacacagtgctttccgtggcactgcatacaatctgaggcctcctctctcagtttttatatagatggcgagaacctaagtttcagttgattttacaattgaaatgactaaaaaacaaagaagacaacattaaaacaatattgtttcta

SEQ ID NO: 607 - DNA, 2816 bp, Homo sapiens
tgggggcgtcctccttcgtccccgcccggctgtcaagctgtgttctagcggccgagggaccgaggggggctaagaaagggggcgcccagccatgcagaggcaaaaaggcgctgcggaacggggtccccgtcgccagtgctgaggcaggaggtcggagccacaagtgaggggctgggaagcaggacccagcacgggcgtcttggcaggcggccgggcgcagggccaggctgctggggacgctcagggctttccacccaagccatgggcgctgtcgggcactcgggggtcccctcgtggctccggccactcggcgtgggcattacgttggcttcacatcgccatccagcctcgaagccaacaggactgaaaaatagcttcggccaaacgttctcctcccgctaaggagaggggtcgagtgcgtcagcccgaggggactggagagggatgccctagccctcgaggggcggaggacccgcggttgaaggaggcagcgggagcggagagcgccctccttgaccatcgaatgcctccttctgtgtttccattcctgtcgagtgggctgggccacgctgaccaccctggaggagggacggacgacgctcggcgggctctgaccgtgccgccttcttgtggctgctgactgggatccaggagggagtgggcatggggcgcagccgcgcctccctccctccccgcctcccgggcgccggggttggcgatgtggagacgtgaggggacccgtcggctgctccggcttctccaggactccgccaggcgcccgcgcgtccctcctcacccggaggaggagaggctccgcgcggggctccgaggcgggcggcgcgcggagccggagtcccagcctcgccatgggacataacgggagctggatctctccaaatgccagcgagccgcacaacgcgtccggcgccgaggctgcgggtgtgaaccgcagcgcgctcggggagttcggcgaggcgcagctgtaccgccagttcaccaccaccgtgcaggtcgtcatcttcataggctcgctgctcggaaacttcatggtgttatggtcaacttgccgcacaaccgtgttcaaatctgtcaccaacaggttcattaaaaacctggcctgctcggggatttgtgccagcctggtctgtgtgcccttcgacatcatcctcagcaccagtcctcactgttgctggtggatctacaccatgctcttctgcaaggtcgtcaaatttttgcacaaagtattctgctctgtgaccatcctcagcttccctgctattgctttggacaggtactactcagtcctctatccactggagaggaaaatatctgatgccaagtcccgtgaactggtgatgtacatctgggcccatgcagtggtggccagtgtccctgtgtttgcagtaaccaatgtggctgacatctatgccacgtccacctgcacggaagtctggagcaactccttgggccacctggtgtacgttctggtgtataacatcaccacggtcattgtgcctgtggtggtggtgttcctcttcttgatactgatccgacgggccctgagtgccagccagaagaagaaggtcatcatagcagcgctccggaccccacagaacaccatctctattccctatgcctcccagcgggaggccgagctgcacgccaccctgctctccatggtgatggtcttcatcttgtgtagcgtgccctatgccaccctggtcgtctaccagactgtgctcaatgtccctgacacttccgtcttcttgctgctcactgctgtttggctgcccaaagtctccctgctggcaaaccctgttctctttcttactgtgaacaaatctgtccgcaagtgcttgatagggaccctggtgcaactacaccaccggtacagtcgccgtaatgtggtcagtacagggagtggcatggctgaggccagcctggaacccagcatacgctcgggtagccagctcctggagatgttccacattgggcagcagcagatctttaagcccacagaggatgaggaagagagtgaggccaagtacattggctcagctgacttccaggccaaggagatatttagcacctgcctggagggagagcaggggccacagtttgcgccctctgccccacccctgagcacagtggactctgtatcccaggtggcaccggcagcccctgtggaacctgaaacattccctgataagtattccctgcagtttggctttgggccttttgagttgcctcctcagtggctctcagagacccgaaacagcaagaagcggctgcttccccccttgggcaacaccccagaagagctgatccagacaaaggtgcccaaggtaggcagggtggagcggaagatgagcagaaacaataaagtgagcatttttccaaaggtggattcctagcaaggattgtaaattcttggaagcaacggggggcttccatattcccaccagagtgtgggaatgctgtggccatgtgattgtatgatctccttgcaactcagtgtgagttgattcctccaatatgggccagatgcttttgaatgatagggaaatctacataaaatccagtgtcctctttattgagggagtatatgtatccatctcagtgatccatgtccttagtgaagtccacattattctctgtggggacaagagctgggcagttttgaatgggtcttgaggtgggtaccccatgtgcactttctgaggatgcctcacttccctgggctctgcagagaacacacagagagaagactttcagagctcacaggagcagggagcaggagcactctaagggaattc

SEQ ID NO: 608 - DNA, 1826 bp, Homo sapiens
agtatgtgtggttggggaattcatgtggaggtcagagtggaagcaggtgtgagagggtccagcagaaggaaacatggctgccaaagtgtttgagtccattggcaagtttggcctggccttagctgttgcaggaggcgtggtgaactctgccttatataatgtggatgctgggcacagagctgtcatctttgaccgattccgtggagtgcaggacattgtggtaggggaagggactcattttctcatcccgtgggtacagaaaccaattatctttgactgccgttctcgaccacgtaatgtgccagtcatcactggtagcaaagatttacagaatgtcaacatcacactgcgcatcctcttccggcctgtcgccagccagcttcctcgcatcttcaccagcatcggagaggactatgatgagcgtgtgctgccgtccatcacaactgagatcctcaagtcagtggtggctcgctttgatgctggagaactaatcacccagagagagctggtctccaggcaggtgagcgacgaccttacagagcgagccgccacctttgggctcatcctggatgacgtgtccttgacacatctgaccttcgggaaggagttcacagaagcggtggaagccaaacaggtggctcagcaggaagcagagagggccagatttgtggtggaaaaggctgagcaacagaaaaaggcggccatcatctctgctgagggcgactccaaggcagctgagctgattgccaactcactggccactgcaggggatggcctgatcgagctgcgcaagctggaagctgcagaggacatcgcgtaccagctctcacgctctcggaacatcacctacctgccagcggggcagtccgtgctcctccagctgccccagtgagggcccaccctgcctgcacctccgcgggctgactgggccacagccccgatgattcttaacacagccttccttctgctcccaccccagaaatcactgtgaaatttcatgattggcttaaagtgaaggaaataaaggtaaaatcacttcagatctctaattagtctatcaaatgaaactctttcattcttctcacatccatctacttttttatccacctccctaccaaaaattgccaagtgcctatgcaaaccagctttaggtcccaattcggggcctgctggagttccggcctgggcaccagcatttggcagcacgcaggcggggcagtatgtgatggactggggagcacaggtgtctgcctagatccacgtgtggcctccgtcctgtcactgatggaaggtttgcggatgagggcatgtgcggctgaactgagaaggcaggcctccgtcttcccagcggttcctgtgcagatgctgctgaagagaggtgccggggaggggcagagaggaagtggtctgtctgttaccataagtctgattctctttaactgtgtgaccagcggaaacaggtgtgtgtgaactgggcacagattgaagaatctgcccctgttgaggtgggtgggcctgactgttgccccccagggtcctaaaacttggatggacttgtatagtgagagaggaggcctggaccgagatgtgagtcctgttgaagacttcctctctaccccccaccttggtccctctcagatacccagtggaattccaacttgaaggattgcatcctgctggggctgaacatgcctgccaaagacgtgtccgacctacgttcctggccccctcgttcagagactgcccttctcacgggctctatgcctgcactgggaaggaaacaaatgtgtataaactgctgtcaataaatgacacccagaccttcc

SEQ ID NO: 609 - DNA, 3980 bp, Homo sapiens
gctggcggctgtttccgggcttagagggctggagtggccgccgagttggaggcggtggtggcagcagtaggagtgtgtagagtgcgggattgggggccaggccctgcggagggcgggggaagttgtcttcttttttttccggaggggccggtaaacctggtggctgaacggcaagatgaatttcctccgcggggtaatggggggtcagagtgccggaccccagcacacagaagccgagacgattcaaaagctttgtgacagagtagcttcatctactttattggatgatcgaagaaatgctgttcgtgctctcaaatcattatctaagaaataccgcttggaagtgggtatacaagctatggaacatcttattcatgttttacaaacagatcgttcagattctgaaataataggttatgctttggacatactatataatataatatctaatgaagaagaagaagaagtagaagaaaattccacaagacagagtgaagatttgggaagccaatttacagaaattttcattaagcagcaggaaaatgtcactcttctgttatctttattggaggagtttgatttccatgtccgctggcctggtgtgaagcttcttacttctcttttaaaacaactagggcctcaggtgcaacaaattattttagtcagtcctatgggtgtttcaagattgatggacttactagcggattccagggaagttatacgtaatgatggcgtcttactactgcaggcactaacaagaagcaatggtgcaatccagaaaattgttgcttttgaaaatgctttcgagagactactggacattatttcagaggaggggaacagtgatggaggtatagtagttgaagattgtttgattttgctccaaaacttattaaaaaacaacaactccaatcaaaatttttttaaagaaggctcatatattcaacgtatgaaaccttggtttgaagttggagatgaaaattctggctggtctgcacagaaagtgaccaatctacatctaatgctacagcttgttcgtgtattggtatctcccaccaaccctcctggtgctaccagtagctgccagaaggctatgttccagtgtgggttattgcagcagctttgtactatcctaatggctactggggttcctgctgatatcctgactgagaccataaatactgtatcagaagttattcgaggctgccaagtaaaccaagactactttgcatctgtaaatgcaccttcaaacccaccaagaccggcaattgtagtacttctcatgtccatggttaatgaaaggcagccatttgttttgcgctgtgctgttctctattgtttccagtgtttcttgtataaaaaccaaaaaggacaaggagaaatcgtgtcaacacttttaccttctaccattgatgcaacaggtaattcagtttcagctggccagttattatgtggaggtttgttttctactgattcactttcaaactggtgtgctgctgtggcccttgcccatgcgttgcaagaaaatgccacccagaaagaacagttgctcagggttcaacttgctacaagtattggcaaccctccagtttctttacttcaacagtgcaccaatattctttcacagggaagcaaaatacaaacaagagttggattattaatgttgctttgtacctggctaagcaattgtcccattgcagtaacgcattttcttcacaattcagccaatgttccattccttacaggacaaattgcagaaaatcttggagaagaagagcagttggtccaaggcttatgtgcccttttgttgggcatttcgatttatttcaatgataactcacttgagagctacatgaaagagaagctaaaacaactgattgagaagaggattggcaaagagaatttcatagagaaactaggatttattagcaaacatgagttgtattccagagcatctcagaaaccccagccaaactttcccagtccagaatacatgatatttgatcatgagtttacgaagctggtaaaagaacttgaaggtgttataactaaggctatttataagtccagtgaagaagataaaaaagaagaagaggtgaaaaaaacattagaacagcatgacaatattgtgactcactacaaaaatatgattcgagagcaagatctccaacttgaggaattaaggcagcaggtttctacattaaaatgtcaaaatgaacagctccagacggcagtcacacagcaagtatcacagatccagcagcacaaagaccagtataatcttcttaaaatacagctaggaaaagacaatcagcatcaaggttcttacagtgagggggctcagatgaatggcattcagccagaagaaattggtagattgcgagaagagatagaagaattaaaacgtaatcaggaacttttacaaagccagctgactgaaaaggactctatgattgaaaatatgaaatcttcccaaacatctggcacaaatgaacagtcttcagcaatagtttcagctagagattctgaacaagttgcagaattaaaacaggaactggcaactttaaagtctcagttaaactcacaatctgtggagatcaccaaactacagacagaaaagcaggaactgttacagaaaacagaagcgtttgcaaaatcagttgaggtacaaggagagaccgagactataatagccaccaaaactactgatgtagaaggaagactgtcagcattattacaagagaccaaagagttaaagaatgaaattaaagctctgtctgaggaaagaactgccattaaagagcagctggattcatctaatagtaccattgccattttacaaactgagaaagacaaactagagttggaaattacagattctaaaaaagaacaagatgatctcttggtgctcttggccgatcaagatcagaaaatactgtcattgaagaataaactcaaggatcttggtcatccagttgaagaagaggatgaacttgaatctggagaccaagaggatgaggatgatgaaagtgaagatcctggcaaggatctagatcatatctagttttcaaatctctaggaacaatagagattatatcataactctgaagatggactctaaactttggtttacctccatggaaaataaagatttagaaaccaggtggaaaacattcactattaagactattgatatatttttgtaatgttgccacccatgttgaaaaccttaaaactgaatttatgtagaacacacatcttttatttaaatccatctgaactgtcccaaaatgtaatttgcaaagagcttcaaacaccaaaaatataccattttaaggcatgtggtgacaatgctatttgccttagttcattcgttgtttactttgcaaaatttgtgacttttaagtactaacacatttgattgaatgtgtattgaattggaattattatttctaaattcagcatttgagtccttagttgatgattttcttttaaagaaattagtttatttaaaagcaagatagcctgggttgggagttagtgcatatcatcagccctccatctaatgtgattgctaagatgtgcaggataggacagcttagaatgagtgccttgacacctacatatggctgcattccatacctcagtgaagaagccgaaggatgctgacacacagtgatgtggagggcattccggagaaacttttgcaacagtgtattaatgtgattggttttctttttgttttaagctaaacatctaaaacaaatttcaagttaacagttcatacaactcagatttagtattattgtttatcataaaacatattatgttcctagttttaaaaagacccaaagtatgattaatataatttattggcatttttgctgaataggtttaagtcagataatagattttaaaaaagcaaatgaggcaatgtgtccaaatttaatgtttcataataaaaatagatacgttgactt

SEQ ID NO: 610 - DNA, 1290 bp, Homo sapiens
gcggcggcggcggtagaggcggcggcggcggcggcagcgggctcggaggcagcggttgggctcgcggcgagcggacggggtcgagtcagtgcgttcgcgcgagttggaatcgaagcctcttaaaatggcagatgacttggacttcgagacaggagatgcaggggcctcagccaccttcccaatgcagtgctcagcattacgtaagaatggctttgtggtgctcaaaggccggccatgtaagatcgtcgagatgtctacttcgaagactggcaagcacggccacgccaaggtccatctggttggtattgacatctttactgggaagaaatatgaagatatctgcccgtcaactcataatatggatgtccccaacatcaaaaggaatgacttccagctgattggcatccaggatgggtacctatcactgctccaggacagcggggaggtacgagaggaccttcgtctccctgagggagaccttggcaaggagattgagcagaagtacgactgtggagaagagatcctgatcacggtgctgtctgccatgacagaggaggcagctgttgcaatcaaggccatggcaaaataactggctcccaggatggcggtggtggcagcagtgatcctctgaacctgcagaggccccctccccgagcctggcctggctctggcccggtcctaagctggactcctcctacacaatttatttgacgttttattttggttttccccaccccctcaatctgtcggggagcccctgcccttcacctagctcccttggccaggagcgagcgaagctgtggccttggtgaagctgccctcctcttctcccctcacactacagccctggtgggggagaagggggtgggtgctgcttgtggtttagtcttttttttttttttttttttttttttaaattcaatctggaatcagaaagcggtggattctggcaaatggtccttgtgccctccccactcatccctggtctggtcccctgttgcccatagccctttaccctgagcaccaccccaacagactggggaccagccccctcgcctgcctgtgtctctccccaaacccctttagatggggagggaagaggaggagaggggaggggacctgccccctcctcaggcatctgggagggccctgcccccatgggctttacccttccctgcgggctctctccccgacacatttgttaaaatcaaacctgaataaaactacaagtttaatatgaaaaaaaaaaaaaaaaaaaaaaaaaaaaaaaaaaaaaaaaaaaaaaaaaaa

SEQ ID NO: 611 - DNA, 811 bp, Homo sapiens
gggacagcgggcagggaaagccgcgggaagggtactccaggcgagaggcggacgcgagtcgtcgtggcaggaaaagtgactagctccccttcgttgtcagccagggacgagaacacagccacgctcccacccggctgccaacgatccctcggcggcgatgtcggccgccggtgcccgaggcctgcgggccacctaccaccggctcctcgataaagtggagctgatgctgcccgagaaattgaggccgttgtacaaccatccagcaggtcccagaacagttttcttctgggctccaattatgaaatgggggttggtgtgtgctggattggctgatatggccagacctgcagaaaaacttagcacagctcaatctgctgttttgatggctacagggtttatttggtcaagatactcacttgtaattattccaaaaaattggagtctgtttgctgttaatttctttgtgggggcagcaggagcctctcagctttttcgtatttggagatataaccaagaactaaaagctaaagcacacaaataaaagagttcctgatcacctgaacaatctagatgtggacaaaaccattgggacctagtttattatttggttattgataaagcaaagctaactgtgtgtttagaaggcactgtaactggtagctagttcttgattcaatagaaaaatgcagcaaacttttaataacagtctctctacatgacttaaggaacttatctatggatattagtaacatttttctaccatttgtccgtaataaaccatacttgctcgtaaaaaaaaaaaaaaaaaaaa

SEQ ID NO: 612 - DNA, 391 bp, Homo sapiens
  misc_feature (245)..(245): n is a, c, g, or t
  misc_feature (308)..(308): n is a, c, g, or t
  misc_feature (313)..(313): n is a, c, g, or t
  misc_feature (352)..(352): n is a, c, g, or t
tttttttttgatataaggaatttattgtgtaaaaaagaaacatctagagaatgccacagacaggcctagtatggctacagtaccgtatataaaagacaattgctcacaatgatagcactgaagcactgagagatatcaaagtactttctgaatcgaatcaaatgatacttagtgtagttttaatatcctcatatatatcaaagttttactactctgataattttgtaaaccagggtaaccaggancatccagtcatacagcttttgggtgatatataacttgggcaataacccagtctgggtgatacntaaanctactcactgtactcatctgggtatatacccgcacggancattttggaaattcccaatttcttgggtcaggtgatata

SEQ ID NO: 613 - DNA, 2512 bp, Homo sapiens
gaggcacagacagaggcgcggaggctcggagagagaagacgtggagggagggacagagcctggacagcggtggacacggcatcgtgcgcggggaagagggcagcacgcagcaggcgccgagcgccgggcaccgagaagggcagcccgggtgatctccggccgtccatgcacagagcgccttcccccacagccgagcagccgccgggcggaggggacagcgcccgccggaccctgcagcccagactcaagcccagtgcccgagccatggcactgcctcggacgctgggggagctgcagctgtaccgggtcctgcagcgcgccaacctcctttcctactatgagaccttcatccagcagggaggggacgacgtgcagcagctgtgtgaggcgggtgaggaggagtttctggagatcatggcacttgtgggcatggccaccaagcccctccatgtccggcgcctgcagaaggcactgagagagtgggccaccaatccagggctcttcagtcaaccagtgcctgctgttcccgtctccagcatcccgctcttcaagatctctgagactgcgggtacccggaaagggagcatgagcaatgggcatggcagcccaggggaaaaggcaggcagtgcccgcagttttagccccaagagcccccttgaacttggagagaagctatcaccactgcctgggggacctggggcaggggacccccggatctggccaggccggagcactccagagtcggacgttggggcaggaggagaagaggaggctggctcgccccccttctccccccctgcagggggaggagtccctgaggggactggggctggggggctggcagcaggtgggactgggggtggtccagaccgactggagccagagatggtacgcatggtggtggaaagtgtggagaggatcttccggagcttcccaaggggggatgctggggaggtcacatccctgctaaagctgaataagaagctggcacggagcgttgggcacatctttgagatggatgataatgacagccagaaggaagaggagatccgcaaatacagcatcatctatggccgtttcgactctaagcggcgggagggcaagcagctcagcctgcacgagctcaccatcaacgaggctgctgcccagttctgcatgagggacaacacgctcttattacggagagtggagctcttctctttgtcccgccaagtagcccgagagagcacctacttgtcctccttgaagggctccaggcttcaccctgaagaactgggaggccctccactgaagaagctgaaacaagaggttggagaacagagtcaccctgaaatccagcagcctcccccaggccctgagtcctatgtacccccataccgccccagcctggaggaggacagcgccagcctgtctggggagagtctggatggacatttgcaggctgtggggtcatgtccaaggctgacgccgccccctgctgacctgcctctggcattgccagcccatgggctatggagccgacacatcctgcagcagacactgatggacgaggggctgcggctcgcccgcctcgtctcccacgaccgcgtgggccgcctcagcccctgtgtgcctgcgaagccacctctcgcagagttcgaggaagggctgctggacagatgtcctgccccaggaccccatcccgcgctggtggagggtcgcaggagcagcgtgaaagtggaggctgaggccagccggcagtgagggttggactggtgtcttcagacccaggacctcagacttctggctcacacagacccccacgctctccatccccggaatctagtcacaaccctggatccttcctctgcccttctcctgcctccccacctgctccatgggcataagactgtggggcttcaagcaataacaagcagaggcctggagagaggacacaaggagggtgcgtggtgccctcacccctgcccagagcgagggggcaaggactctgcctccagggcatctggggttttcccctccctcacacaacacactcccattctctttaggtttgcaccagtggtgtgagcagttggactcagtttggacaagggggaaagggggacttccctgggaaggtccagctaaaagtggcaacatttgcccccagaattgggggcctgggaacactggacctgctccttctcccctctccttccccgtttttgtgcttctggtttgtttctttaattaatttaacaagtgctgcagtttgccctcccattcccatctatcccccaagtcctttgcaatttcttccctgccctacataggggcggtgggtgtgggatcccttcactggccccctcgggaggcctgggttggactcagggtctcctccagctgggggctggaccgcagcacctatctgagcagttagagcgtctttcttttcagattgtgtacagtagattatttattttgttattttggaataaaatttattttatggcttaggaaaaaaaaaaaaaaa

SEQ ID NO: 614 - DNA, 285 bp, Homo sapiens
  misc_feature (11)..(11): n is a, c, g, or t
  misc_feature (190)..(190): n is a, c, g, or t
  misc_feature (266)..(266): n is a, c, g, or t
  misc_feature (273)..(273): n is a, c, g, or t
cacactgcaanatggattcgaacctagtgaattctgggctcagtcctcctcctccatctctttcttgatccagtccacgtagttgagcactttggtgtaagacgccatagccctgctgcacccgatgccccaggacacgatgcccgtggcacccggatgctgtagttgcagcgaggtcaggggggtaggnccgagggtactccaggctggagatgtagcctgatgcctccgtgtacagctcgctgctgcactcagcctggcaggantgctgtnttcctgaagctc

SEQ ID NO: 615 - DNA, 1085 bp, Homo sapiens
ggtttctattgacttgggttaatcgtgtgaccgcggtggctggcacgaaattgaccaaccctggggttagtatagcttagttaaactttcgtttattgctaaaggttaatcactgctgtttcccgtgggggtgtggctaggctaagcgttttgagctgcattgctgcgtgcttgatgcttgtcccttttgatcgtggtgatttagagggtgaactcactggaatggggatgcttgcatgtgtaatcttactaagagctaatagaaaggctaggaccaaaccagaaacctccaattctcatgtggaagcccatgccctcaccctccaacatgaaagcctctgcagcacttctgtgtctgctgctcacagcagctgctttcagcccccaggggcttgctcagccagttgggattaatacttcaactacctgctgctacagatttatcaataagaaaatccctaagcagaggctggagagctacagaaggaccaccagtagccactgtccccgggaagctgtaatcttcaagaccaaactggacaaggagatctgtgctgaccccacacagaagtgggtccaggactttatgaagcacctggacaagaaaacccaaactccaaagctttgaacattcatgactgaactgaaaacaagccatgacttgagaaacaaataatttgtataccctgtcctttctcagagtggttctgagattattttaatctaattctaaggaatatgagctttatgtaataatgtgaatcatggtttttcttagtagattttaaaagttattaatattttaatttaatcttccatggattttggtgggttttgaacataaagccttggatgtatatgtcatctcagtgctgtaaaaactgtgggatgctcctcccttctctacctcatgggggtattgtataagtccttgcaagaatcagtgcaaagatttgctttaattgttaagatatgatgtccctatggaagcatattgttattatataattacatatttgcatatgtatgactcccaaattttcacataaaatagatttttgtataacaaaaaaaaaaaaaaaaaa

SEQ ID NO: 616 - DNA, 2526 bp, Homo sapiens
gcacacagtgcacgaagacgctgtcgggagagcccaggattcaacacgggccttgagaaatgtggctcttgtacctcctggtgccggccctgttctgcagggcaggaggctccattcccatccctcagaagttatttggggaggtgacttcccctctgttccccaagccttaccccaacaactttgaaacaaccactgtgatcacagtccccacgggatacagggtgaagctcgtcttccagcagtttgacctggagccttctgaaggctgcttctatgattatgtcaagatctctgctgataagaaaagcctggggaggttctgtgggcaactgggttctccactgggcaaccccccgggaaagaaggaatttatgtcccaagggaacaagatgctgctgaccttccacacagacttctccaacgaggagaatgggaccatcatgttctacaagggcttcctggcctactaccaagctgtggaccttgatgaatgtgcttcccggagcaaattaggggaggaggatccccagccccagtgccagcacctgtgtcacaactacgttggaggctacttctgttcctgccgtccaggctatgagcttcaggaagacaggcattcctgccaggctgagtgcagcagcgagctgtacacggaggcatcaggctacatctccagcctggagtaccctcggtcctacccccctgacctgcgctgcaactacagcatccgggtggagcggggcctcaccctgcacctcaagttcctggagccttttgatattgatgaccaccagcaagtacactgcccctatgaccagctacagatctatgccaacgggaagaacattggcgagttctgtgggaagcaaaggccccccgacctcgacaccagcagcaatgctgtggatctgctgttcttcacagatgagtcgggggacagccggggctggaagctgcgctacaccaccgagatcatcaagtgcccccagcccaagaccctagacgagttcaccatcatccagaacctgcagcctcagtaccagttccgtgactacttcattgctacctgcaagcaaggctaccagctcatagaggggaaccaggtgctgcattccttcacagctgtctgccaggatgatggcacgtggcatcgtgccatgcccagatgcaagatcaaggactgtgggcagccccgaaacctgcctaatggtgacttccgttacaccaccacaatgggagtgaacacctacaaggcccgtatccagtactactgccatgagccatattacaagatgcagaccagagctggcagcagggagtctgagcaaggggtgtacacctgcacagcacagggcatttggaagaatgaacagaagggagagaagattcctcggtgcttgccagtgtgtgggaagcccgtgaaccccgtggaacagaggcagcgcatcatcggagggcaaaaagccaagatgggcaacttcccctggcaggtgttcaccaacatccacgggcgcgggggcggggccctgctgggcgaccgctggatcctcacagctgcccacaccctgtatcccaaggaacacgaagcgcaaagcaacgcctctttggatgtgttcctgggccacacaaatgtggaagagctcatgaagctaggaaatcaccccatccgcagggtcagcgtccacccggactaccgtcaggatgagtcctacaattttgagggggacatcgccctgctggagctggaaaatagtgtcaccctgggtcccaacctcctccccatctgcctccctgacaacgataccttctacgacctgggcttgatgggctatgtcagtggcttcggggtcatggaggagaagattgctcatgacctcaggtttgtccgtctgcccgtagctaatccacaggcctgtgagaactggctccggggaaagaataggatggatgtgttctctcaaaacatgttctgtgctggacacccatctctaaagcaggacgcctgccagggggatagtgggggcgtttttgcagtaagggacccgaacactgatcgctgggtggccacgggcatcgtgtcctggggcatcgggtgcagcaggggctatggcttctacaccaaagtgctcaactacgtggactggatcaagaaagagatggaggaggaggactgagcccagaattcactaggttcgaatccagagagcagtgtggaaaaaaaaaaacaaaaaacaactgaccagttgttgataaccactaagagtctctattaaaattactgatgcagaaagaccgtgtgtgaaattctctttcctgtagtcccattgatgtactttacctgaaacaacccaaagggcccctttctttcttctgaggattgcagaggatatagttatcaatctctagttgtcactttcctcttccactttgataccattgggtcattgaatataactttttccaaataaagttttatgagaaatgccagtgtgcaaaaaaaaaaaaaaaaaaaaaaaaaaaaaa

SEQ ID NO: 617 - DNA, 93 bp, Homo sapiens
atggaccccaactgctcctgtgccgctggtgtctcctgcacctgcgccagctcctgcaagtgcaaagagtgcaaatgcacctcctgcaagaag

SEQ ID NO: 618 - DNA, 87 bp, Homo sapiens
  misc_feature (84)..(84): n is a, c, g, or t
aaattattttattttaaagtaaatataactttgccagattttaatcaattaacagcagtttagagatatagatatacatatatntat

SEQ ID NO: 619 - DNA, 2379 bp, Homo sapiens
gagagtcggcgcccgcaacgcggagccgggaagtcgtcgctactctggtggaactcagagttggttctggaggcggcggacgcggaggtccctcagaggatccagcgaggggcgccaacaagaggcgaagaggtggcaccagggcggcggcaggaagaggagcgggagcaggagcgcggagcggagcgtcccgacccgccgtgcgtactttctggagggaaggggcgggggaatcggcccctgagggaagcgcccggtggcgagggggttagccaagttccggctgcggcgccactccctcggttccacgagaggaaagttttttttttccagacgcttccgccggctcgcgccctccgggcccagcctcccgagccttcggagcgggcgccgtcccagcccagctccggggaaacgcgagccgcgatgcctggggggtgctcccggggccccgccgccggggacgggcgtctgcggctggcgcgactagcgctggtactcctgggctgggtctcctcgtcttctcccacctcctcggcatcctccttctcctcctcggcgccgttcctggcttccgccgtgtccgcccagcccccgctgccggaccagtgccccgcgctgtgcgagtgctccgaggcagcgcgcacagtcaagtgcgttaaccgcaatctgaccgaggtgcccacggacctgcccgcctacgtgcgcaacctcttccttaccggcaaccagctggccgtgctccctgccggcgccttcgcccgccggccgccgctggcggagctggccgcgctcaacctcagcggcagccgcctggacgaggtgcgcgcgggcgccttcgagcatctgcccagcctgcgccagctcgacctcagccacaacccactggccgacctcagtcccttcgctttctcgggcagcaatgccagcgtctcggcccccagtccccttgtggaactgatcctgaaccacatcgtgccccctgaagatgagcggcagaaccggagcttcgagggcatggtggtggcggccctgctggcgggccgtgcactgcaggggctccgccgcttggagctggccagcaaccacttcctttacctgccgcgggatgtgctggcccaactgcccagcctcaggcacctggacttaagtaataattcgctggtgagcctgacctacgtgtccttccgcaacctgacacatctagaaagcctccacctggaggacaatgccctcaaggtccttcacaatggcaccctggctgagttgcaaggtctaccccacattagggttttcctggacaacaatccctgggtctgcgactgccacatggcagacatggtgacctggctcaaggaaacagaggtagtgcagggcaaagaccggctcacctgtgcatatccggaaaaaatgaggaatcgggtcctcttggaactcaacagtgctgacctggactgtgacccgattcttcccccatccctgcaaacctcttatgtcttcctgggtattgttttagccctgataggcgctattttcctcctggttttgtatttgaaccgcaaggggataaaaaagtggatgcataacatcagagatgcctgcagggatcacatggaagggtatcattacagatatgaaatcaatgcggaccccagattaacgaacctcagttctaactcggatgtctgagaaatattagaggacagaccaaggacaactctgcatgagatgtagacttaagctttatccctactaggcttgctccactttcatcctccactatagatacaacggactttgactaaaagcagtgaaggggatttgcttccttgttatgtaaagtttctcggtgtgttctgttaatgtaagacgatgaacagttgtgtatagtgttttaccctcttctttttcttggaactcctcaacacgtatggagggatttttcaggtttcagcatgaacatgggcttcttgctgtctgtctctctctcagtacagttcaaggtgtagcaagtgtacccacacagatagcattcaacaaaagctgcctcaactttttcgagaaaaatactttattcataaatatcagttttattctcatgtacctaagttgtggagaaaataattgcatcctataaactgcctgcagacgttagcaggctcttcaaaataactccatggtgcacaggagcacctgcatccaagagcatgcttacattttactgttctgcatattacaaaaaataacttgcaacttcataacttctttgacaaagtaaattacttttttgattgcagtttatatgaaaatgtactgatttttttttaataaactgcatcgagatccaaccgactgaattgttaaaaaaaaaaaaaaaaa

SEQ ID NO: 620 - DNA, 4442 bp, Homo sapiens
gaccactgtgagcccgcggcgtgaggcgtgggaggaagcgcggctgctgtcgcccagcgccgccccgtcgtcgtctgccttcgcttcacggcgccgagccgcggtccgaagtcttgctgtgtcacccaggctgccaggctggagtggagtggcatgatctcggctgactgcaacctctgcctcccagaatatgacagatacctagcatctagcaaaataatggcagctgcttaccttgaccccaacttgaatcacacaccaaattcgagtactaagactcacctgggtactggtatggaacgttctcctggtgcaatggagcgagtattaaaggtctttcattattttgaaagcaatagtgagccaaccacctgggccagtattatcaggcatggagatgctactgatgtcaggggcatcattcagaagatagtggacagtcacaaagtaaagcatgtggcctgctatggattccgcctcagtcacctgcggtcagaggaggttcactggcttcacgtggatatgggcgtctccagtgtgagggagaagtatgagcttgctcacccaccagaggagtggaaatatgaattgagaattcgttatttgccaaaaggatttctaaaccagtttactgaagataagccaactttgaatttcttctatcaacaggtgaagagcgattatatgttagagatagctgatcaagtggaccaggaaattgctttgaagttgggttgtctagaaatacggcgatcatactgggagatgcggggcaatgcactagaaaagaagtctaactatgaagtattagaaaaagatgttggtttaaagcgattttttcctaagagtttactggattctgtcaaggccaaaacactaagaaaactgatccaacaaacatttagacaatttgccaaccttaatagagaagaaagtattctgaaattctttgagatcctgtctccagtctacagatttgataaggaatgcttcaagtgtgctcttggttcaagctggattatttcagtggaactggcaatcggcccagaagaaggaatcagttacctaacggacaagggctgcaatcccacacatcttgctgacttcactcaagtgcaaaccattcagtattcaaacagtgaagacaaggacagaaaaggaatgctacaactaaaaatagcaggtgcacccgagcctctgacagtgacggcaccatccctaaccattgcggagaatatggctgacctaatagatgggtactgccggctggtgaatggaacctcgcagtcatttatcatcagacctcagaaagaaggtgaacgggctttgccatcaataccaaagttggccaacagcgaaaagcaaggcatgcggacacacgccgtctctgtgtcagaaacagatgattatgctgagattatagatgaagaagatacttacaccatgccctcaaccagggattatgagattcaaagagaaagaatagaacttggacgatgtattggagaaggccaatttggagatgtacatcaaggcatttatatgagtccagagaatccagctttggcggttgcaattaaaacatgtaaaaactgtacttcggacagcgtgagagagaaatttcttcaagaagccttaacaatgcgtcagtttgaccatcctcatattgtgaagctgattggagtcatcacagagaatcctgtctggataatcatggagctgtgcacacttggagagctgaggtcatttttgcaagtaaggaaatacagtttggatctagcatctttgatcctgtatgcctatcagcttagtacagctcttgcatatctagagagcaaaagatttgtacacagggacattgctgctcggaatgttctggtgtcctcaaatgattgtgtaaaattaggagactttggattatcccgatatatggaagatagtacttactacaaagcttccaaaggaaaattgcctattaaatggatggctccagagtcaatcaattttcgacgttttacctcagctagtgacgtatggatgtttggtgtgtgtatgtgggagatactgatgcatggtgtgaagccttttcaaggagtgaagaacaatgatgtaatcggtcgaattgaaaatggggaaagattaccaatgcctccaaattgtcctcctaccctctacagccttatgacgaaatgctgggcctatgaccccagcaggcggcccaggtttactgaacttaaagctcagctcagcacaatcctggaggaagagaaggctcagcaagaagagcgcatgaggatggagtccagaagacaggccacagtgtcctgggactccggagggtctgatgaagcaccgcccaagcccagcagaccgggttatcccagtccgaggtccagcgaaggattttatcccagcccacagcacatggtacaaaccaatcattaccaggtttctggctaccctggttcacatggaatcacagccatggctggcagcatctatccaggtcaggcatctcttttggaccaaacagattcatggaatcatagacctcaggagatagcaatgtggcagcccaatgtggaggactctacagtattggacctgcgagggattgggcaagtgttgccaacccatctgatggaagagcgtctaatccgacagcaacaggaaatggaagaagatcagcgctggctggaaaaagaggaaagatttctgaaacctgatgtgagactctctcgaggcagtattgacagggaggatggaagtcttcagggtccgattggaaaccaacatatatatcagcctgtgggtaaaccagatcctgcagctccaccaaagaaaccgcctcgccctggagctcccggtcatctgggaagccttgccagcctcagcagccctgctgacagctacaacgagggtgtcaagcttcagccccaggaaatcagcccccctcctactgccaacctggaccggtcgaatgataaggtgtacgagaatgtgacgggcctggtgaaagctgtcatcgagatgtccagtaaaatccagccagccccaccagaggagtatgtccctatggtgaaggaagtcggcttggccctgaggacattattggccactgtggatgagaccattcccctcctaccagccagcacccaccgagagattgagatggcacagaagctattgaactctgacctgggtgagctcatcaacaagatgaaactggcccagcagtatgtcatgaccagcctccagcaagagtacaaaaagcaaatgctgactgctgctcacgccctggctgtggatgccaaaaacttactcgatgtcattgaccaagcaagactgaaaatgcttgggcagacgagaccacactgagcctcccctaggagcacgtcttgctaccctcttttgaagatgttctctagccttccaccagcagcgaggaattaaccctgtgtcctcagtcgccagcacttacagctccaacttttttgaatgaccatctggttgaaaaatctttctcatataagtttaaccacactttgatttgggttcattttttgttttgtttttttcaatcatgatattcagaaaaatccaggatccaaaatgtggcgtttttctaagaatgaaaattatatgtaagcttttaagcatcatgaagaacaatttatgttcacattaagatacgttctaaagggggatggccaaggggtgacatcttaattcctaaactaccttagctgcatagtggaagaggagagcatgaagcaaagaattccaggaaacccaagaggctgagaattcttttgtctaccatagaattattatccagactggaatttttgtttgttagaacacccttcagttgcaatatgctaatcccactttacaaagaatataaaagctatattttgaagacttgagttatttcagaaaaaactacagccctttttgtcttacctgccttttactttcgtgtggatatgtgaagcattgggtcgggaactagctgtagaacacaactaaaaactcatgtcttttttcacagaataatgtgccagttttttgtagcaatgttatttctcttggaagcagaaatgctttgtaccagagcacctccaaactgcattgaggagaagttccagaaccatcccctttttccatttttatataatttataaagaaagattaaagccatgttgactattttacagccactggagttaactaacccttccttgtatctgtcttcccaggagagaatgaagcaaaacaggaatttggttttcttttgatgtccagttacaccatccattctgttaattttgaaaaaatataccctccctttagtttgttgggggatataaattattctcaggaagaatataatgaactgtacagttactttgacctattaaaaaggtgttaccagtaaa

SEQ ID NO: 621 - DNA, 3471 bp, Homo sapiens
cagattacacttggttgactactccggagcagccactaagagggatgaacaggcctgcgtggaaattgaatgagattcttggaagctcgaagtctggctgtggccatgggagatacagtagtggagcctgcccccttgaagccaacttctgagcccacttctggcccaccagggaataatggggggtccctgctaagtgtcatcacggagggggtcggggaactatcagtgattgaccctgaggtggcccagaaggcctgccaggaggtgttggagaaagtcaagcttttgcatggaggcgtggcagtctctagcagaggcaccccactggagttggtcaatggggatggtgtggacagtgagatccgttgcctagatgatccacctgcccagatcagggaggaggaagatgagatgggggccgctgtggcctcaggcacagccaaaggagcaagaagacggcggcagaacaactcagctaaacagtcttggctgctgaggctgtttgagtcaaaactgtttgacatctccatggccatttcatacctgtataactccaaggagcctggagtacaagcctacattggcaaccggctcttctgctttcgcaacgaggacgtggacttctatctgccccagttgcttaacatgtacatccacatggatgaggacgtgggtgatgccattaagccctacatagtccaccgttgccgccagagcattaacttttccctccagtgtgccctgttgcttggggcctattcttcagacatgcacatttccactcaacgacactcccgtgggaccaagctacggaagctgatcctctcagatgagctaaagccagctcacaggaagagggagctgccctccttgagcccggcccctgacacagggctgtctccctccaaaaggactcaccagcgctctaagtcagatgccactgccagcataagtctcagcagcaacctgaaacgaacagccagcaaccctaaagtggagaatgaggatgaggagctctcctccagcaccgagagtattgataattcattcagttcccctgttcgactggctcctgagagagaattcatcaagtccctgatggcgatcggcaagcggctggccacgctccccaccaaagagcagaaaacacagaggctgatctcagagctctccctgctcaaccataagctccctgcccgagtctggctgcccactgctggctttgaccaccacgtggtccgtgtaccccacacacaggctgttgtcctcaactccaaggacaaggctccctacctgatttatgtggaagtccttgaatgtgaaaactttgacaccaccagtgtccctgcccggatccccgagaaccgaattcggagtacgaggtccgtagaaaacttgcccgaatgtggtattacccatgagcagcgagctggcagcttcagcactgtgcccaactatgacaacgatgatgaggcctggtcggtggatgacataggcgagctgcaagtggagctccccgaagtgcataccaacagctgtgacaacatctcccagttctctgtggacagcatcaccagccaggagagcaaggagcctgtgttcattgcagcaggggacatccgccggcgcctttcggaacagctggctcataccccgacagccttcaaacgagacccagaagatccttctgcagttgctctcaaagagccctggcaggagaaagtacggcggatcagagagggctccccctacggccatctccccaattggcggctcctgtcagtcattgtcaagtgtggggatgaccttcggcaagagcttctggcctttcaggtgttgaagcaactgcagtccatttgggaacaggagcgagtgcccctttggatcaagccatacaagattcttgtgatttcggctgatagtggcatgattgaaccagtggtcaatgctgtgtccatccatcaggtgaagaaacagtcacagctctccttgctcgattacttcctacaggagcacggcagttacaccactgaggcattcctcagtgcacagcgcaattttgtgcaaagttgtgctgggtactgcttggtctgctacctgctgcaagtcaaggacagacacaatgggaatatccttttggacgcagaaggccacatcatccacatcgactttggcttcatcctctccagctcaccccgaaatctgggctttgagacgtcagcctttaagctgaccacagagtttgtggatgtgatgggcggcctggatggcgacatgttcaactactataagatgctgatgctgcaagggctgattgccgctcggaaacacatggacaaggtggtgcagatcgtggagatcatgcagcaaggttctcagcttccttgcttccatggctccagcaccattcgaaacctcaaagagaggttccacatgagcatgactgaggagcagctgcagctgctggtggagcagatggtggatggcagtatgcggtctatcaccaccaaactctatgacggcttccagtacctcaccaacggcatcatgtgacacgctcctcagcccaggagtggtggggggtccggggcaccctccctagagggcccttgtctgagaaaccccaaaccaggaaaccccacctacccaaccatccacccaagggaaatggaaggcaagaaacacgaaggatcatgtggtaactgcgagagcttgctgaggggtgggagagccagctgtggggtccagacttgttggggcttccctgcccctcctggtctgtgtcagtattaccaccagactgactccaggactcactgccctccagaaaacagaggtgacaaatgtgagggacactggggcctttcttctccttgtaggggtctctcagaggttctttccacaggccatcctcttattccgttctggggcccaggaagtggggaagagtaggttctcggtacttaggacttgatcctgtggttggccactggccatgctgctgcccagctctacccctcccagggacctacccctcccagggaccgacccctggcccaagctccccttgctggcgggcgctgcgtgggccctgcacttgctgaggttccccatcatgggcaaggaagggaattcccacagccctccagtgtactgagggtactggcctagccatgtggaattccctaccctgactccttccccaaacccagggaaaagagctctcaattttttatttttaatttttgtttgaaataaagtccttagttagccacttgtgtcatttccaggttttctgggggagtgcagggggagatgggtgatgaggtatgaacggatgcctcagtgtccaagatacaaaaggcaccacatagaagtttgctttttccctgcctgtcttggtcactaccacctcttccctgagaagggcgggccttccatgttctctcacccgcttcaactccacat

SEQ ID NO: 622 - DNA, 2263 bp, Homo sapiens
aggaagtagggagcggggtggcaggggggggacccgccgcggctgctgccaccgccgccaccaccgcctctgctcgtggcgtgggaaaggaggtgtgagtcccgggcgcgagccgcggcggcgccgctgcgggagggtcggcggtgggaaggcgatggcggatttagataaactcaacatcgacagcattatccaacggctgctggaagtgagagggtccaagcctggtaagaatgtccagcttcaggagaatgaaatcagaggactgtgcttaaagtctcgtgaaatctttctcagtcagcctatcctactagaacttgaagcaccactcaaaatatgtggtgacatccatggacaatactatgatttgctgcgactttttgagtacggtggtttcccaccagaaagcaactacctgtttcttggggactatgtggacaggggaaagcagtcattggagacgatctgcctcttactggcctacaaaataaaatatcctgagaatttttttcttctcagagggaaccatgaatgtgccagcatcaacagaatttatggattttatgatgaatgtaaaagaagatacaacattaaactatggaaaactttcacagactgttttaactgtttaccgatagcagccatcgtggatgagaagatattctgctgtcatggaggtttatcaccagatcttcaatctatggagcagattcggcgaattatgcgaccaactgatgtaccagatcaaggtcttctttgtgatcttttgtggtctgaccccgataaagatgtcttaggctggggtgaaaatgacagaggagtgtccttcacatttggtgcagaagtggttgcaaaatttctccataagcatgatttggatcttatatgtagagcccatcaggtggttgaagatggatatgaattttttgcaaagaggcagttggtcactctgttttctgcgcccaattattgcggagagtttgacaatgcaggtgccatgatgagtgtggatgaaacactaatgtgttcttttcagattttaaagcctgcagagaaaaagaagccaaatgccacgagacctgtaacgcctccaaggggtatgatcacaaagcaagcaaagaaatagatgtcgttttgacactgcctagtcgggacttgtaacatagagtatataaccttcatttttaagactgtaatgtgtactggtcagcttgctcagatagatctgtgtttgtgggggcccttccttccatttttgatttagtgaatggcatttgctggttataacagcaaatgaaagactcttcactccaaaaagaaaagtgttttgttttttaattctctgttccttttgcaaacaattttaatgatggtgttaaagctgtacaccccaggacagtttatcctgtctgaggagtaagtgtacaattgatcttttttaattcagtacaacccataatcatgtaaatgctcattttctttaggacataaagagagccctagggtgctctgaatctgtacatgttcttgtcataaaatgcatactgttgatacaaaccactgtgaacattttttatttgagaattttgtttcaaagggattgctttttcctctcattgtcttgttatgtacaaactagtttttatagctatcaacattaggagtaactttcaaccttgccagcatcactggtatgatgtatatttaattaaagcacacttttccccgaccgtatacttaaaatgacaaagccattcttttaaatatttgtgactctttcctaaagccaaagtttctgttgaattatgttttgacacacccctaagtacaaggtggtatggttgtatacacatgctgccttcttggggattcaaaaacaggtttttgattttgaatagcaattagtgatatagtgctgtttaagctactaacgataaaaggtaataacattttatacaatttccatatagtctattcattaagtaatctttttacagttgcatcaggcctgaacccgtccattcagaaagcttcaaattatagaaacaatactgttctatacgagtgaccgattatgctttctttggcctacattctttattctgcggtgaagttgaggcttataagttaaaacaaaggaactaacttactgtccaccagtttatacagaactcacagtacctatgacttttttaaactaagatctgttaaaaaagaaatctgtttcaacagatgaccgtgtacaataccgtgtggtgaaaat

SEQ ID NO: 623 - DNA, 376 bp, Homo sapiens
ctataagtgctttatttttatattctctatgaaaacatcaataattaagcccctttgttctaagccagaaacactataaaactaccattaaacaaggcagtatcttgacaagaaagacataaaatgtccaagggatatttagaacattttagttcttaaagtttcaacatgagaaatgttgaccacacactgtgaaatcatttcaataaataacaactgacattcatctaaacagttacaaaacagatgtgcacatacattcccctgccttcacaatgatctcattggccatttgcttcggatccgccagcctctatcacagtggctggcatgttgcaggctcctcagaaatattaacataatgactggagaacat

SEQ ID NO: 624 - DNA, 2511 bp, Homo sapiens
tctcacttgcagactctcctctgaaactgcggaaaagttcagggaagggtccggggaaccctcggcccaaagctcccagaaaaaccacaagcaagggccccaagtgtctgactcgcaaaggccctggggctggaccccgacgaggctctgggcaccagagcaaaaccaacagagccactgggtcccccagtgtccggcgaatgaaagggggctctgccctgggcaccaaaacagcccaggccaaggtagctcgaacactggccaaagctgctcgtgcccaagccaaggtggctcgaacacaggccaaggctgctaaggcccgggccaaggccaaggcagcactggtcaaggctaaggccaaagctaaggcagcacaggtcaaggccaaggccaaagtcatggcagcacgggccaaggccaaggctaaagccaaggcagtacgggccaaggccaaggtggctcggacccagcccaggggcagaggcaggccaaagggatctgctaaggccagaactacaaggaagggccagaaaaaccgccccgagactgttgggcagaagaggaaaagggctgaggaggcaaaagatcttcctcccaagaagagaacacggcttgggccccgatctcctaaggcatggctagggcctggaacagcaaagctgctgaagttccgtgccataaaggtagataggcggtcctcggatgatgaggtgcggcagcgggctcagcggatcctccgcgtgaacctgtcacctgtaatacggctccagccattgctgccatattcagcagtctgattccttcacacggcaatgtttggggaaactaagcccagctgtctgtgtggctagtggcacagtgtgctatgtccgtggactccacaatcttgaggactcccggtgcctctctagggccctggtgaccaccagcctcctttcagaaaccagagtgggtggggtacggtggggtgggtgggcgggaggggtgttttcatggcgcgatgcactgtgacttgttattcaagttgtatgtctactgttccatctatcacgttttatacctttccaccttccagtctccctgcccaccctccatggtcttctgtgtgtgtgtggctgctggcaggccagcttgaagatatagggaaagtggtcccagaaataggcctgcctatttccgggggttgtgggaggaggcagctcctgggcccctttggagagatgaggggaaattggcttctgtggttgtctgagaggcatcccctgaatgcagaagcagagccactgtgaagtaagacacttccctttgaggctgctctggtttgtgatccagacaggccccattcaggacagtaggccccatgcaggacagtaggttccatggggaaccttgcagctagtgggtttttaggtccaggaatggagcctttgtggtacttccctagggaccaaacagacagcctggctaaaatcttggggcttagcctgggcttttctggtgtgggtccaggcccaaaggggttgaggtgcttctccccactctgctctcgtggcagagagtaactatcctcaacttcgattggtggcaaggtactggtggttgagtcaggaccacagagcttgccctcagtgaccaaataattttctccttggttgggtgaggttttccatgactgcctcatcagcagtgctttctgtatgaatcttaagtgctctctctactcccaggtccagcctcatcatgccctccaacatggtccatatgttaaaatacattgtcacccttcctgctttagagagggggctgggccctgggacctgaaggaggtaactgtcctgcccatctgtagtccatcactggctgcccaggctgaatggcagtgcctggggttggcagggaggggcacacattccccctccctggggtaggggcatcatttcagtgagaatcagatgttttctgtttctgggtttgggccccacaagctgccagctgccctgggtggtggacctgtggagaagctctgtgcttcttggtgccctcctgccccttctgcatcttgtggcatgcttcccctgggtgtgtcctcccttggtttcccaagctctgggaccttgctcccagctgtgctgtcgccccactaccttacatgctacttgcctctgacaactctttcattcatgatgtgaatatggggaatgacctgagagccacactcagctcctcaagggcagcccagcttggggctcacgcctgtaatcccagcactttgggagtccaaggcaggtgggtcagttgaggtcaggagtttgagaccagcctggccaacatggtgaaatctcatctgtactaaaaatacaaaacagccaggtgtggtggcacacacctaaagtcccagctacttgggaggttgaggctggaagatcacttgaacctgggaagcagagtttgcagtgagccaagatctcgccactgcactccaggctgggcgacagagtgagactctgtctc

SEQ ID NO: 625 - DNA, 2202 bp, Homo sapiens
ttcctcgagcactgtggccttttttttttttttttttgaattttcgcacctcgcgagttgcggagcctgcatctctgaagctgcctcggtgaagagccacagcattatttttttttctctttgggagagtagctgtctgggatttgagatcctatcttccctgcaaattaccaggttgcatcttcactgataggaatacatttcttcaccaaaggacatggatgaaaatgaaagcaaccagtctctgatgacaagcagccaatatcctaaagaagcagtaagaaaacgtcaaaattcagcacggaattccggagcaagtgattcttctaggttttctaggaaaagcttcaaactggattatagactagaagaagatgtaactaaatccaagaaaggaaaagatgggagatttgtgaatccgtggccaacatggaaaaacccctctattccaaatgttctcagatggctgataatggagaaagatcacagcagtgttccaagttctaaagaggtagcgcttggcttttttgagtgctttatatttgctcttcatatatgacactctagttatttgagcccttgtatatcataaggcatagaattaggtctgaggagataaagtggataggtgtaacctaggccctaaagttcatcgttcagtagcagagtacatataggaataaccaaccctgatctggtggcaactagaggtaggaacagagtgctttagaggtacaggaaagaacgtgatgctgacaggaagagctggagatggcttcacagaggaggtgaatatttcagctgggcctagtcaactaaaaagtattttgacagtgattttccaggtagatgatggcatgaacaaggtcatgaaggtgagacagtgtattacctgctctggaaggtagtagcctggtacgtgtgtagaatatggatcatgagggtgaaggcatggcctggagtgcttggcttttaacccttggataaggctaccaaagctgtgaaagggagcttcagatgacctttccagaccttgaaaagttgactttaggttcctagcctttaaatgtactagttttacttaagatgattctacttggccttcttctattctgttagaatagacagatcacagttttgggttaagttgatttcatggtttacattgagtatatcaatatttttcattggtgaatgaagtaagtactatgactgtgtctcctttccttatatacctctccctctgctgtgttaacaacatctctttcatctgcttgactttctgtgtatttatgacaattatttccctgcctcctatggcctctcaatgccattttcctgagggaaagactctcaggtggtcgttcagcagtgggctgtagtctgagctgatgccttcccagggtctctgccgacttacattctagggcacccttcaccagcctcctgggctcccttgtgtcttctatggtcacccttgttttctgcatcccacttgttcctctttctgtgtcattttctcattttggtggagcatattttcagtgaacttcctgagaaagggtacatggaaagtaagttttttgaattcttgcttgtctgaaatgtctttattctcattcataattgataatttgggtatagaatttttgtttaaaacagttttctctcagaatttgagagtattgcctccataactttatttctagtgtggctgtggggaagttcagtgccgtccttactcttgatcctttgaacaggccctttgttttctctctagagactttgagaatcctctctttggcaccagtgttctgaaaattgccacgatgtgtagttctttatttattcattgtgctctgtgtgtggtgggccctttcagtctgaaaatccatttccttcagttctaggaaatttcatctgtatctttgaaaatgtccttccctatatgtttttattctaaaatgactattagttatagtagttctattttggacctcctggatcaattctctgtaatttaagaaaatttcttctatgttttatctttttaaaaatttacatggctaggtgcagtagctcatgcctataatacccacactttgggaggctgaggcaggtggattgcttgagctgaggagttcgagaccagccggggcaacatggcaaaatgccatctctaccaaaaaaaaaaaaaaaaaa

SEQ ID NO: 626 - DNA, 2208 bp, Homo sapiens
tctttggctttttttggcggagctggggcgccctccggaagcgtttccaactttccagaagtttctcgggacgggcaggagggggtggggactgccatatatagatcccgggagcaggggagcgggctaagagtagaatcgtgtcgcggctcgagagcgagagtcacgtcccggcgctagcccagcccgacccaggcccaccgtggtgcacgcaaaccacttcctggccatgcgctccctcctgcttctcagcgccttctgcctcctggaggcggccctggccgccgaggtgaagaaacctgcagccgcagcagctcctggcactgcggagaagttgagccccaaggcggccacgcttgccgagcgcagcgccggcctggccttcagcttgtaccaggccatggccaaggaccaggcagtggagaacatcctggtgtcacccgtggtggtggcctcgtcgctagggctcgtgtcgctgggcggcaaggcgaccacggcgtcgcaggccaaggcagtgctgagcgccgagcagctgcgcgacgaggaggtgcacgccggcctgggcgagctgctgcgctcactcagcaactccacggcgcgcaacgtgacctggaagctgggcagccgactgtacggacccagctcagtgagcttcgctgatgacttcgtgcgcagcagcaagcagcactacaactgcgagcactccaagatcaacttccgcgacaagcgcagcgcgctgcagtccatcaacgagtgggccgcgcagaccaccgacggcaagctgcccgaggtcaccaaggacgtggagcgcacggacggcgccctgctagtcaacgccatgttcttcaagccacactgggatgagaaattccaccacaagatggtggacaaccgtggcttcatggtgactcggtcctataccgtgggtgtcatgatgatgcaccggacaggcctctacaactactacgacgacgagaaggaaaagctgcaaatcgtggagatgcccctggcccacaagctctccagcctcatcatcctcatgccccatcacgtggagcctctcgagcgccttgaaaagctgctaaccaaagagcagctgaagatctggatggggaagatgcagaagaaggctgttgccatctccttgcccaagggtgtggtggaggtgacccatgacctgcagaaacacctggctgggctgggcctgactgaggccattgacaagaacaaggccgacttgtcacgcatgtcaggcaagaaggacctgtacctggccagcgtgttccacgccaccgcctttgagttggacacagatggcaacccctttgaccaggacatctacgggcgcgaggagctgcgcagccccaagctgttctacgccgaccaccccttcatcttcctagtgcgggacacccaaagcggctccctgctattcattgggcgcctggtccggcctaagggtgacaagatgcgagacgagttatagggcctcagggtgcacacaggatggcaggaggcatccaaaggctcctgagacacatgggtgctattggggttgggggggaggtgaggtaccagccttggatactccatggggtgggggtggaaaaacagaccggggttcccgtgtgcctgagcggaccttcccagctagaattcactccacttggacatgggccccagataccatgatgctgagcccggaaactccacatcctgtgggacctgggccatagtcattctgcctgccctgaaagtcccagatcaagcctgcctcaatcagtattcatatttatagccaggtaccttctcacctgtgagaccaaattgagctaggggggtcagccagccctcttctgacactaaaacacctcagctgcctccccagctctatcccaacctctcccaactataaaactaggtgctgcagcccctgggaccaggcacccccagaatgacctggccgcagtgaggcggattgagaaggagctcccaggaggggcttctgggcagactctggtcaagaagcatcgtgtctggcgttgtggggatgaactttttgttttgtttcttccttttttagttcttcaaagatagggagggaagggggaacatgagcctttgttgctatcaatccaagaacttatttgtacattttttttttcaataaaacttttccaatgacattttgttggagcgtggaaaaaa

SEQ ID NO: 627 - DNA, 1381 bp, Homo sapiens
cacccctggacacctttgccctgactcgcctgagtccagccgcctgtccctggagcgccgccgatacagcgcctccccgttgaccctccctccagccggctcggctccctctccgcgccagtcccaggagagtctgccaggggcagtatctccgctaagcggaaggaggcggagtccggggctgctggagcggaggggctcggggacgttgctcctggaccacatctcgcaaacgcggccgggtttcctaccccctctcaacgtcagtccccaccctcccatccctgacattcgcccacaacccggaggtcgggcgccttcgttgcctgcccctccttatgccggggcgccaggctctcccaggaccaagcgcaaattggtgagacgccactccatgcagactgagcagatccgcctgctggggggcttccagagtctaggtgggcctggggagccagggcgctgagaggagtgagaggagccaaggagggtggggattaggaccttaatgggataggtgggagaaccagctcacacacacaccacgaacaaagggatctcttgcatgtgctcatgggtgcacagtgcacccacacatggttaaacatgtgtccataagcacagtactcttattagcaagaaagaataagtactctatttactgggtatatacacacatgtattcatgccctggtcatttcacatgcatatgggattacttgtgtacctacaggcacagcatatcaataaacacacagggctagggtcccaaactctcttgcatttgttcagaagcagtagggaacccttacttatgggcagtctccgatgtctttgccctcctgcagaagcaatcccttgctttccatgtatgccctgaaacacagcctatcatgattttgcacactctctccgtggacatcccagcccattctgcaggtcttgcttctttctccaggcctggctccttattcacaccctgcttctaaccccaaccacttttcaggatatctttttcactcttcttgggggttcctgcagcaacccccagcctcagttctgctgctgtctttactgctctcaacttcacttctcaacttcctgctttttattcccaccctgttcctccaacaactacaacagattgtctcattttcccagggggtgggtcatgggctctaagctgctcttctgtctgtctgagcttatgaacacccccacaggtagaagtggggagaaaccctaaatcactcctctctccacttgacatatcaaataaatgtgttcagaaaaaaaaaaaaaaaaacaaaaaaaaaaaaaaaaaaaaaaaaaaaaaaaaaaaaaaaaaaaaaaaaaaaaaagaaaaaaaaaaaaaaaaaaa

SEQ ID NO: 628 - DNA, 503 bp, Homo sapiens
ttttttttttttatagatacaccaaacattctggtgatttttctcaaccagaaatagcacattctacatctattccttagttatataatacaaaacatgcacgaataggctacacatggacagacacttataaataccttctaaataagtgattagaagtttttggtccaatccacatgatatagaaatcttaagagacaacacacatccccttctatgcctcttccacccaaaatacagaacacccattttcagattaggagagaaaaggaataaatagaataactctcagctctctctctatatacacatacacatacatatatgtatacatatatacacacactgtacagctgtgtgtacatgcacgtgtacacacacacatacacatatagctggacactacctgaataacatcataccaggaggctctgaacacctgaattcacagatgatcaggtgagctgattgtagcagtgattacagatatcatgaaaataaag

SEQ ID NO: 629 - DNA, 358 bp, Homo sapiens
  misc_feature (49)..(49): n is a, c, g, or t
gtgtgtcagtggttatattagtgggtagtgtaacattttatccaggttngggtgaggggagatggccacagtagcaagtggtgacactaaataccattttgaaggctgatgtgtatatacatcattactgtccgtagcaatgaaggatacagtactgtgttgtgggtgagtgttgctattgcccagcattaatatttgggtgtgtatgtttgaggctatgaaacacgcaggagtgtttttgtgctattaattttaagagaaagcagctttttcttaaaattcactgttgagaaacttgcatgtctggaggcggtgtcctctccgccctgtcgggtcctggatgagtacgagttatggt

SEQ ID NO: 630 - DNA, 14111 bp, Homo sapiens
ggcgcggtacaggagcagcactgccggcgggggcgggtgccagggacttggaggtggaggggacgcggcggtactctggcgtcttccgacttcgactccttaccttaaaagatgctggagtcatatgtaactccaattttaatgagctatgtgaatcgctacatcaagaacttaaagccgtcggatctacagctttcactatggggtggagacgtggtactcagcaagctcgagttaaagttggatgtgctggaacaggaactgaaattaccattcacttttttaagtggacatattcatgaattgaggattcatgtaccatggacaaaactgggttcagaaccagtggtaattaccatcaatactatggaatgcattttgaaacttaaggatgggatacaggatgaccatgaaagctgtggttctaattctaccaaccgtagtactgctgagagcacaaaatcatcaatcaaaccgcggagaatgcagcaggctgctcctacagatcctgacttaccaccaggttatgtgcagagtctgattagacgagttgtaaataatgtaaacattgtgataaataatctcatactaaaatatgttgaagatgatatcgtcctttccgtcaatatcacttctgcagaatgttatacagtaggtgaattatgggatcgtgcattcatggatatttctgcaactgatttggtgctgagaaaggttatcaatttttctgactgtacagtttgtcttgataaacggaatgccagtggtaaaatagaattttaccaggatcctttattatacaaatgttccttcagaactcgtcttcattttacatatgaaaacctaaattccaagatgccatctgttattaaaattcatactttagtggaaagtttgaaactttctatcacagatcaacaactgcctatgtttattcgtataatgcaacttggaattgctctttactatggagaaataggcaattttaaagaaggcgaaatagaggaccttacttgtcataataaagatatgctaggaaacattacaggttctgaagatgaaacaagaatagatatgcaatatcctgctcagcataaaggtcaagagttatattcacagcaagatgaggagcagccacagggatgggtgtcatgggcctggtcctttgtgcctgcaattgtgagttatgacgatggcgaggaagactttgttgggaacgatcctgcatcaaccatgcatcaacaaaaagcacagactttgaaggatcctattgtttctataggattttattgcacaaaggcaacggtgactttcaaactcacagaaatgcaagttgagagtagttattacagtccacagaaagtaaaatctaaagaagtattgtgttgggaacaagaaggaactacagttgaggcccttatgatgggagaacctttctttgattgccagattgggtttgttggttgcagagccatgtgccttaaaggaattatgggtgttaaagattttgaagagaatatgaatagaagtgaaactgaagcctgtttcttcatttgtggtgacaatttgagtacgaaaggtttcacataccttacaaattcattgtttgattaccgaagcccagaaaataatggtactcgcgcagaatttatcttggattcaactcatcataaggagacatacactgagatagctggaatgcaacggtttggggctttttatatggattacctgtatacaatggagaacactagtggcaaaggttccacaaatcaacaagacttttcttcagggaaaagtgaagatttgggaacagttcaggagaagtccaccaaaagccttgttataggtcctcttgattttcgtttggatagcagtgcggtgcataggattttgaaaatgattgtgtgtgccttggaacatgaatatgaaccatatagcaggctaaaatcagatattaaggatgaaaatgaaacaatactgaatcctgaagaggtggctcttctggaggaatatattcctactcgacatacaagtgttactctcctcaaatgtacctgcacaatttccatggctgaattcaacttgctggaccatttactacctgtcattatgggagaaaagaactcaagtaacttcatgaatactacaaacttccagtctcttcggcctttgccatccattcgaatattggtggataaaattaatctggaacattcagtgccaatgtatgctgaacagttggtgcatgtggtcagcagccttactcaaccttctgataacctgcttcattattgttatgtacactgctatcttaagatatttggtttccaggcaggactgacgtctttggattgcagtggatcttactgcttacctgtaccagttattccctctttcagcactgctctttatgggaaacttctgaaactccccacatgctggaccaaaagatctcagattgctataactgaaggtatatttgaacttccaaatctcacaattcaagctacaagagcacagacacttctcttgcaagcaatatatcaaagttggtctcatcttggaaatgtcagctcttccgcagtgattgaagctttgataaatgaaatcttcctaagtataggtgtgaaatctaagaatcccctgccaactcttgagggctcaatccagaatgttgaattgaagtactgcagcacatcattggtcaaatgtgcctctgggaccatgggatcaataaaaatttgtgccaaagccccagttgatagtggaaaagagaagttgattcccttgcttcagggtccttctgacactaaagaccttcatagcaccaagtggctcaatgagagtagaaagccagagtctctcttagctccagatttgatggccttcacaatccaagttccacaatatattgactactgccacaattccggtgctgtacttctttgcagtatacaaggactagcagttaatattgacccaatcttatatacgtggctcatctatcagcctcagaaacgaacaagtagacatatgcaacagcagcctgtggtagctgttcctcttgttatgccagtttgtagaaggaaagaggatgaggtgtctattggaagtgcccccttggcaaagcagcaatcatatcaggcctctgaatatgccagcagccctgtaaaaacaaaaacggtaacagaatcccgcccattgtcagttcctgttaaagccatgttgaatatatctgaaagctgtagaagtcctgaagaaagaatgaaggaatttattggaattgtttggaatgcagtgaagcatctcacactacagcttgaagtacaatcttgttgtgtgtttattccaaatgatagcctgccttccccaagtacaattgtatctggtgacattcctggaacagtaagaagttggtaccatggacaaaccagcatgccgggaacacttgtcctctgtttgcctcaaataaagattattagtgctgggcacaagtatatggaacctctgcaggagattccatttgttatcccacgacccatccttgaagaaggtgatgcttttccttggacgatcagcttgcataatttcagcatatatacccttcttggaaaacaagtgacactttgcctagtggaacctatgggttgcacctccactctagctgtcacgtctcaaaaactgcttgctacgggacctgatacacgacattcatttgttgtctgtctccatgttgacctagagtcactagagataaaatgctctaatccccaggtccagctcttctatgaactaactgatatcatgaataaggtctggaacaagattcagaagagaggcaatctcaacctatctccaacctctccagagaccatggcagggcctgttcctacttctccagttagaagcagtataggcacagctcctccagataccagcacatgcagcccatctgctgacattgggactactactgagggagattctatacaagcaggtgaggaatcaccattctcagattctgtgaccttggaacaaactacaagtaatattggaggaaccagtggacgtgttagtttatggatgcagtgggtgcttcccaaaattactataaagctctttgctccagatcctgaaaataaaggcacagaggtttgtatggtcagtgaactagaagatctcagtgcttccatagatgtccaggatgtatataccaaagtgaaatgtaaaatagagagtttcaatattgatcactatagaagcagccttggggaagagtgttggtctttggggcaatgtggaggtgtcttcctttcctgtactgacaagctgaacagacgcaccttgttggttcgacccatcagcaagcaggaccctttcagtaattgctctggcttctttccttctacaactacaaaacttctagatggcactcatcagcagcatggattcctctctctgacatacacaaaagctgtaacaaaaaatgtccgccacaagttaacatcaagaaatgagcgaagaagttttcataagttatctgaaggcctaatggatggttctcctcattttcttcatgaaattcttctttcagcacaagcttttgatattgttctttattttcctttacttaatgccattgcaagtatatttcaagcaaaactaccaaagacccaaaaagagaaaagaaaatctcctggtcagcccatgaggacccatacactgacatcccgcaatttacctttgatttatgtcaacacaagtgtaatcagaatttttattccaaaaacagaagaaatgcagccaactgttgaagctaatcaggcagcaaaagaagacactgtggttttgaagattggctctgttgccatggctccccaggctgacaatccccttggcagatctgtccttaggaaagatatttaccagagagccttgaacttaggaattcttcgagatcctggatcagaaatcgaagacagacaataccaaatagatctgcagtccatcaatattggtactgcacagtggcatcaactaaaaccagagaaggaaagtgtctcaggaggggtggtaacagagactgaaaggaattctcaaaatccagcccttgagtggaatatggccagcagcatacggcggcatcaagaaaggagagcaattttgacccccgttttgacagatttttctgtccgaataactggagcacctgctgtcattttcaccaaagtagtttctccagaaaatttgcatactgaggagattttagtgtgtggccattccttagaagtgaatataaccacaaacctggacttcttcctaagtgtggctcaagttcaactcttacatcagttaatagtagcaaatatgactggactggaaccatcaaacaaggctgcagagatctctaaacaagaacagaaaaaagtggatatatttgatggaggcatggctgaaacctcatctcgctacagtggtgctcaggatagtggaattggcagtgacagtgttaaaatcagaatagtgcaaatagagcagcacagtggtgccagtcagcatcgcattgcccgtccctcacgccagtcatcaattgtaaaaaatctaaattttattccctttgacatatttattactgcaagtagaatctcactaatgacctattcctgtatggccttatccaaatcgaaatcacaagaacagaagaataatgaaaaaacagacaagagttcattaaatctcccagaagttgattcagatgttgctaagcccaaccaggcatgtatttccacggtgacagcagaagatctcttaaggagcagcatttcttttccttcagggaaaaaaataggggtcctctctcttgaaagtcttcatgcatccacaaggtcatctgctagacaagcacttggtataactattgttcggcagcctggtcgaagaggaactggtgacttacagctagagccttttctgtactttattgtgtcccagccttccttgcttctgagttgtcaccacagaaagcagcgagtggaagtatccatttttgatgctgtgcttaaaggggtggcctctgattacaaatgtatagatcctgggaagactctgcctgaagcccttgattattgcactgtttggctacagacagtgcctggagaaatagacagcaaaagtggtattccaccttcctttataacactacagattaaagactttctgaatggaccagcggatgtcaatttggatatatcaaagcctttgaaagcaaacctgagtttcaccaaactggatcagataaacctttttttaaagaagataaaaaatgcacacagtttggcacatagtgaagagacttcagccatgtccaacaccatggtgaataaggatgatcttccagtctccaaatattaccgtggaaagttgtctaaacccaaaattcatggtgatggagtgcaaaagatttcagctcaagaaaacatgtggagagctgtttcctgctttcaaaaaatttctgttcaaactactcagattgtgatctccatggaaactgtaccccataccagcaaaccatgcctgttagcatctctctcaaacctcaatggaagccttagtgtcaaggcaacacaaaaagtacctggcataattcttgggtcatcatttctactcagtataaacgattttctccttaaaacaagtctcaaagaaagaagccgcattctgataggaccatgttgtgctactgccaatctggaagctaagtggtgtaaacacagcgggaatccaggcccagaacaatccataccaaaaatatccattgacttaagaggaggtctactacaggtcttctggggtcaagaacatttgaattgtttagttcttctacatgaattactcaatggataccttaatgaggagggaaattttgaagtacaagtttctgaaccagtgcctcaaatgtcatctcctgtggaaaagaatcagacatttaaaagtgaacaaagttcagatgacctacggacaggtctatttcagtatgtacaggatgctgaatctttgaaattgcctggggtctatgaagtcttattttataatgaaactgaagattgcccagggatgatgttatggagatatccagaacctagagtactcacccttgtacgaataactcctgtaccttttaacaccacagaggatccagatattagcacagcagaccttggtgatgtgctacaggttccttgtagcttggaatactgggatgaactccagaaggtttttgttgcatttagagaatttaatctgtctgaaagcaaagtttgtgaactgcagttgccggatatcaatctcgtgaatgaccagaagaaattagtatcttcagatctttggagaattgtcttgaacagcagtcaaaatggagctgatgaccaaagctctgcaagtgagtctggttctcaaagcacttgtgatccacttgtgactccaacagccctggctgcctgtaccagagttgactcctgctttaccccatggtttgtcccatccctttgcgtttctttccagtttgctcacctggaattccatctttgtcatcaccttgaccaactaggcacagctgcaccacagtacctacagccatttgtttccgacagaaatatgccatctgaactagaatacatgattgtttccttcagagaaccacacatgtatcttcgacagtggaataatggttctgtctgtcaggagatccagttcttagctcaagcagactgtaaacttctagagtgcagaaatgtcactatgcaaagtgtggtgaaacccttcagcatcttcgggcagatggcagtttccagcgatgtagtggaaaagctgcttgactgcaccgtgatagttgattctgtatttgtaaaccttggacagcatgtagtccattcactaaacactgcaatacaagcttggcaacagaacaaatgccctgaggtagaggagttggtcttcagccattttgtgatctgtaatgacacacaggagacactgcggtttggccaggtggatactgatgaaaatattctgctggcgagtctccacagtcaccagtacagctggcgctctcacaaatccccacagctgttacacatctgtattgaaggttggggcaactggcgttggtcagagcctttcagtgtggaccatgccgggacttttattagaacaattcagtacaggggtcgaactgcttctctcatcatcaaggttcagcaactcaatggagtacaaaaacagattatcatctgtggaagacagatcatctgtagttacttgtctcaaagcatagaactaaaagtcgttcagcattacattggtcaagatggacaagctgtagttcgggaacattttgactgcctcacagccaaacagaaattgccttcgtacatactagaaaacaatgaactgacggagctgtgtgtgaaggccaaaggagatgaagactggtcaagagatgtgtgcctggaatccaaagcccctgagtacagcattgtcattcaggtgccatcttcaaacagttccattatttatgtctggtgcacagttttgactttagaacccaactctcaagtgcaacaacgaatgattgtgttcagccctctttttatcatgaggagtcatcttccagaccccattatcatacatttggagaaaaggagtctgggattgagtgaaacacaaattattccaggaaaagggcaggaaaaaccactgcaaaacatagaacctgaccttgtacatcacctgacattccaagcaagagaagaatatgatccttcagattgtgcagttcccatctcaacatccctcattaagcaaatagccactaaggtacaccctggaggcacagttaatcagatccttgacgaattctatgggccagaaaagtcgcttcaacccatatggccctataataagaaggattctgacaggaatgaacagctaagtcagtgggatagcccaatgcgagtgaagctgtcaatctggaagccatatgttagaactttgttgatagaacttctgccctgggccctgcttatcaatgaatccaaatgggacctctggctatttgaaggagagaaaattgttctacaggttcctgctggcaaaattattattcctcctaattttcaggaagcttttcaaattggaatatactgggcaaatacaaacactgtgcacaagtcagtagcaattaaactggtccataacctgacatctccaaagtggaaagatggaggtaatggtgaagttgtgacactggatgaagaagcgtttgttgatactgaaataagacttggtgcttttccaggacatcagaagttatgtcagttctgcatttcctccatggtacagcaaggtatacaaattattcagattgaagacaagactacaataatcaataatacaccatatcaaatattttataaaccacagctatctgtctgcaatccccattctggaaaggagtattttcgtgttccagacagtgctacttttagcatttgcccaggtggagagcagcctgctatgaaatccagctcccttccttgctgggacttgatgcctgacatcagtcagtcagtactggatgcatccctgcttcagaaacagatcatgctgggcttttctcctgccccaggtgctgacagctcacagtgctggagcctgccagctatagttagaccagagtttcccagacagagtgtggcagtacccctcgggaatttccgggaaaatggattctgtaccagggctatagtgctgacatatcaagaacacctcggagtgacttatttaaccctctcagaagaccctagtcctcgagtaattatccacaatagatgtccagtaaaaatgcttataaaggaaaacattaaagatattccaaagtttgaggtttattgcaaaaaaattccctccgagtgctcaattcatcatgagctgtatcatcagatttccagttatccggactgcaagaccaaagacttacttccaagcctacttttgagagttgaacctctagatgaagtaacaactgagtggagtgatgccattgacatcaacagtcagggaacacaggttgtgttcctgactggctttggctatgtgtatgtggatgttgtacatcagtgtggcacagtcttcatcactgtggccccagaaggaaaagcaggacctattttaaccaataccaacagagcgccagagaagattgttacatttaaaatgttcatcactcagttaagcctggcagtgtttgatgacctcacccaccacaaagcatcagctgagcttctgagactcacactggacaacatttttctctgtgtggccccgggagctggtcccctccctggggaagagcctgtggctgcgttgtttgaactttactgtgtggagatctgctgtggggacctgcagctagacaaccagctttataacaagtccaatttccactttgctgtcttagtctgccagggagaaaaagcagaacccattcagtgttccaaaatgcagagtctcctcatatccaacaaagagttggaagaatacaaggaaaaatgttttatcaaactttgcatcaccttaaatgaaggcaagagcatcctctgtgatattaatgagttcagctttgaattaaaacctgctcggttatacgtggaagacacatttgtatactacatcaagactttgtttgacacctaccttcctaacagcaggttggctggtcactccacacacctctccgggggtaaacaggtgttgcccatgcaggtcacacagcacgccagggccttggtgaatcctgtgaagttacggaaactggtgatccagccagtaaatttgctcgtcagcatccacgcttccctcaagctgtacatagcctcagaccacactcctctctccttctcggtgtttgaaagaggacccatcttcaccactgcgaggcagcttgtgcacgccctggcaatgcactatgccgctggggccctttttagagcaggctgggtagttgggtctctggatattcttggcagccctgcaagcctggtgagaagcatcgggaacggggtcgccgacttcttcaggcttccgtatgaggggctgacccggggccctggagccttcgtgagtggcgtctccagagggaccacatcgtttgtaaagcacatctccaaaggtaccctcacatccatcaccaacctcgccacaagcctggcccggaacatggaccggctctcactggatgaggagcactacaaccggcaggaggagtggcggcggcagctccccgagagcctgggcgaggggcttcgacagggcctgtcccggctgggcatcagcctgcttggtgcaattgctggtatagttgatcagccgatgcagaacttccagaaaacatctgaggcacaggcttcagcaggacacaaggccaagggtgtcatctcgggtgtggggaaaggaatcatgggggtgttcacaaagcccatcggaggagctgctgagctggtgtcacagactggctatggtattttacatggagctggactttctcagcttcccaaacagcgccatcagccaagtgatctacatgctgaccaggctccaaacagccatgtcaaatatgtctggaaaatgcttcagtctctgggcagaccagaagtccacatggccctggacgtggttctggtgaggggctcaggccaggagcatgaagggtgcttgctgctgacatcagaagtgctcttcgtggtgagtgtcagtgaggacacacagcagcaggccttccccgtcacagaaatcgactgtgcacaggacagcaagcagaacaacttactcacagtgcagctcaagcagccaagagtggcctgtgatgtggaggtagatggagtccgagagagactgtcagagcaacagtacaacagactggtggactacatcacaaagacatcttgtcacctggcccccagctgttcttccatgcaaataccatgccctgtggtggctgcagaacctcccccctccactgttaaaacataccattacctggttgatccacattttgctcaggtcttccttagtaaatttaccatggtgaaaaataaagccctgaggaaagggtttccttgagtcccctctgaggtgtttattcctgcttgtgtgatttagtttttgggtttctttgagacagggtctcactgcattgcccttgctgacctcaaattctggggttcaagcaatcctcccacctcaacccacaagtagctacgactgcaagcacctgccaccataaagggctgcattttgccaccataaagggctgcatttttttaaaaagcctaggcagctctaacatcatctgatatggacacaaggccaacagtttccttatttacatccttacctctaaaagatacttcaaagtgacaaaaacgtgttccttccccacttagagacaatgattaacagggccctatatgttcttaccacatacagaggatgcatttatttttgctctatgacacttgcaaaaatctctactgtaattaatttgggtctattattaactctctgttccatcatagaatgtggccaggccttacaatggagagccagagttaaaacttcaagttgcatctgtttttgggctgagtcaccacctttgcctcatgctcctttgtctgcaaaggcctaggattctttctttaaatgaaatgcttaggactttgtggcttgttacatttgtcatttaactgcagtgctattctttgaaagctgctatgtgtattttctctgaagtctgcattttactaaaatttacaacagtctgatgattgattgattactgtccaggtacattttagaaaaagtgttcttcttccagtttgttttactaagcaaactttgagtaaatcctttgtcctatattgaatccagtcccaaagtgttcaggtgagtttctctagttccataaacaaaacatacatagtgggaactccctggtatgccatagagcacacaagaaccccaatattaatgctaacaattataccagtccattttgtttattctgtggaattgacttgacaaagcatgaagatattcccagtgtctgtctgataatattttgcatctaagaatgggtttgactcaagatcttgggttaccaagatgtcttaaatgttcagtaaatatctttcttacagtccagtagcttagagcatgtttgctgattgatattacatttaaacttggggctacagcttgttacctagaattttgagatactaagagaatgcaattttaaatgcccactggttttatttgttttggagagagggtctcattctgtcacccaggctagagtacagtgggaacagtcatggctcactgcagcttaagctcactgcctgggctcaagtgatcttactccagcctcccaagcagctgggactacaccaccacaggtatgcaccaccatacctggctgatttttaaaattttttctagagatgaggtctcactatgttgcccagctggtctcatactcctcagttcacgcattcctcccacctccacctcccaaactgctgggattacaggtgtgagccaccatgcccaacacccactgatctttaactctcacatgttgggcataagaagtcactatataattgttactggaaagcaagacttaacgaacaattctgactatgaaaaatgtctctttcagtttgttctgtaaatatttagaaaagtgacagctgtcaacctcagagtaactatttctaaaaatgtaaatatgtattaatccttgtatcttttatggtaattttgcatattgatatgaattatataaaattgtttaaaataaaaggtgtccttgaattactgaccacccatagatgtctactgttaccaggttttacaatgcaaattttcactaatacctgggtttaatacagctcacatcactgaatgttacacatgagtttaaatgggtaatatacaggttttgttataataaagttactgattaaattaaaaaaaaaaaaaaaaaa

SEQ ID NO: 631 - DNA, 327 bp, Homo sapiens
  misc_feature (309)..(309): n is a, c, g, or t
agtgttatataacttttaatggaaaatgtcaaatagatacaaaagtataaatcgggttggcaagtgaaatacaggccaaaattgggcccaccagctgtttttgcacagcccaaatgttaagaatgatttttacatttttaaatagtgaaaagatgtaaaagggtaatatctaatgacataagaaaagtatgtgaaattcagattttattgtccaaaaagtttggaacacagccacatgcactggtgcgtggccccctggtggcggcttcatgccactactgccaagtggcaatgagagccccatggctnggaaaagccaacaatctt

SEQ ID NO: 632 - DNA, 4744 bp, Homo sapiens
cgaaatgagagcaaaaagggagagagcaggaaagcgagcacaggcgagtacagtatacaaagtgttttgagtttctgactggcgtgccggaaagatcatgttagcacacccagaaacttcacacgatgcagaccccagaggtaccagcagaaaggtcccctcgtagacggagtatctcagggaccagtacatcagagaaacccaactccatggacactgcaaatacctcacccttcaaagtaccaggattcttcagcaagcgcctgaaaggctccatcaagaggaccaaaagccagtcaaagcttgacagaaacacgagctttcggcttccatcccttcgcagtacagatgacaggtctcgtgggctgcctaaactaaaagagtcacgttcccatgaatccttgctgagcccatgcagcacagtggaatgtctggatcttggtagaggggaacctgtatcagtgaaaccacttcatagtagcatccttggacaagacttctgctttgaggttacctacttaagtggaagtaaatgcttcagctgtaattctgcttctgagagagacaagtggatggaaaaccttcgcaggacagttcaacctaataaggacaattgcaggcgagctgaaaatgttcttcgtttatggatcattgaagccaaggaccttgcccctaaaaagaaatatttctgcgaactgtgccttgatgataccctctttgctcgtacaaccagcaagaccaaagcagacaatattttctggggcgaacattttgaattcttcagccttccacctcttcatagtatcacagttcacatttacaaggatgtggaaaaaaagaaaaaaaaggacaagaataattatgtagggctagtcaacatccccactgccagtgtgactggtcgccaatttgtagaaaagtggtatccagtgagtacacctacacccaacaaaggaaagacaggaggaccttctattcggattaaatcacgtttccaaactatcaccattctgcctatggagcaatacaaagaatttgcagaatttgtcaccagcaactacaccatgctgtgttctgtccttgagccagtaattagtgtgagaaataaagaggagttggcttgtgccttagtgcacattcttcaaagtactggcagagccaaggattttctgactgacttggtgatgtctgaggtggatcgttgtggagagcatgatgtcttgatcttcagagagaacactattgccaccaaatccattgaggaatacctcaagttggtgggacaacagtatcttcatgacgcactgggggagtttatcaaagctttgtatgagtccgatgagaactgtgaagtggatcccagcaaatgttcatctagtgaactgatagaccatcagagcaacctgaaaatgtgctgtgagctggctttctgcaagatcatcaactcttactgtgttttccctcgtgagttgaaagaagtgtttgcatcatggaagcagcagtgcctgaaccgtggcaagcaagacatcagcgagaggctcatcagtgcctcattatttctccgttttctgtgtccagccattatgtctcccagtcttttcaaccttatgcaggagtatcctgatgaccgcacatctcggactctaactcttattgccaaggtcattcagaacctggccaactttgccaagtttggtaacaaagaggaatacatggcattcatgaatgattttttagaacatgaatggggtggaatgaagcgctttcttttggagatctctaatccagacaccatctcaaacaccccaggctttgatggttacattgatctgggccgagagctttcagttttgcattccttactgtgggaagtagtttcccaacttgataagggtgaaaattccttcctacaggcgaccgtggcaaaattggggcctctccctcgtgttcttgctgatattaccaagtcattgactaatcctacgccaatacaacagcaactgagacgcttcactgaacataactccagtccaaatgtcagtggaagcctctcctctgggctgcagaaaatatttgaagaccccactgacagtgatttgcataaactaaaatctccaagccaggacaacacagacagctacttcagagggaaaacattattgctggttcagcaagcctcctctcagagcatgacttattctgaaaaggatgaaagggaaagtagccttcctaatggtcggagcgtctccctcatggacctccaggacactcatgctgctcaagtggagcatgcatctgtcatgcttgatgtgcctatacgcttgaccggaagccagctttccataacccaggtggccagcatcaaacagctgcgggaaacccagagcactccccaaagtgcaccccaagtgagaaggcccctgcacccagccttgaaccagccaggtggccttcagcccttgtcgttccagaaccctgtctatcacctcaataacccaattccagcaatgccaaaggcctctatagattccagtttggagaacctaagcactgccagttccagaagccaaagtaacagtgaagacttcaagctcagtggacccagcaatagcagcatggaagatttcactaaacgtagcactcagagtgaggacttctccaggcggcacacggtgccagatagacacatacctcttgctttgccacgacaaaatagtactgggcaggcccagatccgaaaagtggaccagggtgggttaggtgcccgagccaaagccccaccatccctgccacacagtgcttctttacgtagcaccgggagcatgtcagtggtgtccgcagccctggtggccgaacctgtgcagaatgggagccggtcccggcagcagtcctcttcctccagagagagccctgttcccaaagttagagcaatccagagacaacagacacagcaggttcagtcacctgtggactctgccacaatgtccccagtagagaggacagcagcctgggttctgaacaatgggcagtatgaagaggatgtggaagaaactgagcaaaatctagatgaagccaagcatgctgagaagtatgaacaagaaattactaaactgaaggagcgcctgagagtttccagccggcgactggaggaatatgaacgccgcttgctggtgcaggagcagcagatgcagaagctgctgctggaatacaaggcccgactggaggacagcgaggagcggctccgaagacagcaggaagaaaaagatagccagatgaaaagcatcatcagcaggctaatggctgtggaagaggaactgaagaaggatcatgctgagatgcaagcagttattgatgcaaagcagaaaataattgatgcacaggaaaaacggatcgtgtccctggattcagccaacaccagactgatgagcgcgctgacccaagtgaaggagcggtacagcatgcaggtccgcaatggcatctcccccaccaaccccaccaagctttccatcacggagaatggtgaattcaaaaacagcagctgctgacgggctttgtctgtggaaggagacagaaggaaattgacccactctcctatctccagacctttacctagcccctccaggtttacagaatgttgctacttcacaatggcgatgtggtgagaaactcctgaatgaagaaaggaaccttgtctttcagggcataaggcggcgacttccaaggtcaatgcttttcccccacatctctatgtacatagggaacttagttctgggccatgtacagaaaatatcactgtaatataccaaaaggaagttaataatgtagattacctttttgattattgctatttttattattgttttcctcttgttgaaagcactgcagttgttacaggaagtaaagtaggaactgttgtgtgagcgagacatgagcctgtaggttcagtaggtagagaccaagcatctatctgatagaagcacatggagtgcaataggacattgtgagaaggaatttttcagggattcatctactagtttaaaaaccccactctggccctcttgtcctttcagaaaacatgcaaataccaagatccatacaaaacaataatttattccactgatcaaccaagactggttctggttggacagctaatctgatttggggattcactgtttcagaggacacagacaaaagctgttgcatcaaaactggactttaggagtaatttctattgaactcctgtcaatatgtttatttcctctgtctacagcagatgggagtcttctcttttagacaggggctttttgtttttaaccccaattgtaataaagggtgttctttttcctctttagagtttacaaaactataaatatttgtgtctccacataccatcttcatcttcacacattcactgtgctttcctccccatagtgggagctgtcatcaccaacagggtttactctcccctggagaggttatttaaatagctgtccataagccatccagatcaacaccctttcttccatacagaaaagggctaaccataccacagctggaatctctgaatatttcctattaaaaattttttctatgtgttgttataatttttgtttgggataaagactctatccattgtactagcaaatctatggggggtaattttatctccatctttaacttttaaagtacttcttccccttatcccctcaataaagaaaggaaatccaaaaaaaaaaaaaaaaaa

SEQ ID NO: 633 - DNA, 2368 bp, Homo sapiens
cgggcgatgccgcgctgcgggggggccgcacagccgccgccaccgccaccgccgccgggtggggtgggaggggcgggaacgcgcgccgccgcctccagggtgggcgcctttcgccgtggacgccgaccgtccgggacgagggtttcatcaccttaaatggttttgaaccaatgaaggtgtattcccttaaaaagacggacagcccatcgtgtgaactatagagtttgtggacagatttatattgggttcatagtggcgtcatgcacgcagactcctgcaagttcccctaagttcttagaggactgctttgccttttgatctgagagttgcaaagttccataaagaatggcccttgtggataagcacaaagtcaagagacagcgattggacagaatttgtgaaggtatccgcccccagatcatgaacggccccctgcacccccgccccctggtggcgctgctggacggccgcgactgcactgtggagatgcccatcctgaaggacctggccactgtggccttctgtgacgcgcagtcgacgcaggaaatccacgagaaggttctaaacgaagccgtgggcgccatgatgtaccacaccatcaccctcaccagggaggacctggagaagttcaaggccctgagagtgatcgtgcggataggcagtggctatgacaacgtggacatcaaggctgccggcgagctcggaattgccgtgtgcaacatcccgtctgcagccgtggaagagacagcggactctaccatctgccacatcctcaacctgtaccggaggaacacgtggctgtaccaggcactgcgggaaggcacgcgggttcagagcgtggagcagatccgcgaggtggcctcgggagcggcccgcatccgtggggagacgctgggcctcattggctttggtcgcacggggcaggcggttgcagttcgagccaaggcctttggattcagcgtcatattttatgacccctacttgcaggatgggatcgagcggtccctgggcgtgcagagggtctacaccctgcaggatttgctgtatcagagcgactgcgtctccttgcactgcaatctcaacgaacataaccaccacctcatcaatgactttaccataaagcagatgaggcagggagcattccttgtgaacgcagcccgtggcggcctggtggacgagaaagccttagcacaagccctcaaggagggcaggatacgaggggcagccctcgacgtgcatgagtcagagcccttcagctttgctcagggtccgttgaaagatgccccgaatctcatctgcactcctcacactgcctggtacagtgagcaggcgtcactggagatgagggaggcagctgccaccgagatccgccgagccatcacaggtcgcatcccagaaagcttaagaaattgtgtgaacaaggaattctttgtcacatcagcgccttggtcagtaatagaccagcaagcaattcatcctgagctcaatggtgccacatacagatatccgccaggcatcgtgggtgtggctccaggaggacttcctgcagccatggaagggatcatccctggaggcatcccagtgactcacaacctcccgacagtggcacatccttcccaagcgccctctcccaaccagcccacaaaacacggggacaatcgagagcaccccaacgagcaatagcagagaatgccagaaggtaatcactcagatacacttgggaccaagagacagtgaaaaatagatgaactaagagaaaaagaatcggatggtctttgtaactgattctggacatatgcatcattgatgttgcagtgttgaaactacaagagctagaaaactgaagatgtcgtctgcttacggaagcgctgaaagactaggatgtgatttattaacgaccaacttctgttattgtgtgttaagtttttcatctgtgcatcaaatcacaaaaagaataaatagagctttttcctttatcagtcccttgggcacagcaggtcctgaacaccctgctctacaatgttgcatcaagagttcaaacaacaaaataaaaaatattaagaggaaatccccatcctgtgacttgagtcccttaagtctacaggggctggtgacctctttttgctaataggaaaatcacattactacaaaatggggagaaaactgtttgcctgtggtagacacctgcacgcataggattgaagacagtacaggctgctgtacagagaagcgcctctcacatctgaactgcatactgagcgggcaagtcggttgtaagttcagtaaaaccctctgatgatgcaaaaaaaaaaaaaaagtattaagtttcacaagctgtttgtactcaaatatattttctcagtttcag

SEQ ID NO: 634 - DNA, 3595 bp, Homo sapiens
ggaggtgggaagtatcccgggctgggggtgggggtacgccgcacagctccagtcgccgtcgcggcttccggtgctaggtggagggaaggaaggagggagccggggagtgggccagggcagcagccgggctgaagtcggcttggggagccagagggagcggagcggaacctgcggggcagaggcggcggccgcagcggcgcagctgatagcaggaacaggatcaagtcttccataccagggaccaggccaaaaccagactgccactgcccctacttgggccccactgtccccagaaagcagctgctgtgatcatgggcaatatctttggaaaccttctcaagagcctgattgggaagaaggagatgcgcatcctgatggtgggcctggatgccgcaggaaagaccaccatcctatacaagctgaaactgggggagatcgtcaccaccatccctaccattgggttcaatgtggagacagtggagtataagaacatcagctttacagtgtgggatgtgggtggccaggacaagattcgacccctctggagacactacttccagaacacccaagggttgatatttgtggtcgacagcaatgatcgggagcgagtaaatgaggcccgggaagagctgatgagaatgctggcggaggacgagctccgggatgctgtactccttgtctttgcaaacaaacaggatctgcctaatgctatgaacgctgctgagatcacagacaagctgggcctgcattcccttcgtcaccgtaactggtacattcaggccacctgtgccaccagcggggacgggctgtacgaaggcctggactggctggccaatcagctcaaaaacaagaagtgaaagccagacagccctaacaaagcaccccacccacccctgacatacctactgtcaccctgccccagtcctaccccttcctctccatgcaagtgtggccagggccctgggtatcatgtccacatgcccagcaagagccttgcctcccctgcctcccctcctttttcctgtccacctatatgaccaatccctaattgctgtcctgatgatgagtcattccaatttactggatttaaaacaaaaagttgttacggtttcatggggtggcccctctctctctctcacctctgggtttcgggaggtcgagtggggtattctctttgtttggcagtggttgctgtcctcttggcatctgagtcctttccctgtccccacaagcccttctactccctgtttgcctttcctttgccaccctctccctgttttacatggaaattgcacgggcctctctgtgtttgcgtgcatgtgtgcgcctgtatatacatgtatagagagatatatttgtgggggccggggggagcggggagggggtggagtgaagctcagggcttgcagccaggacactgcccactggagcctgtcatctgccccttccgtgttggtgagattaagggaagaaggtgggagggcattagtcaagccggactgccccagtctttgactggttaccctcctctctgcaggtaggtttttctggatgataggacagatgatggattcttcaccaccattttccttgtactcttctctccacccttcttagggctggaggatggcatttatctctagatgactgttcccaaggagatgccactctgctctgccttactgttgggaaggagagaggaacccactcactcttatcagcttagagtgttcaactgatccttccccaccatcttcagatctgttcctctggagcttgactggggggtggggatggcaagtccatggtgtgtgttagggacccagggcattgggggaagggaggcgaaggcctgaggttttccatcttcattctcttttgttattaggagaaggtgaggcatgggccaatcccattcctgccttccagtgccccaccacccttctgatcttaggggttggatgggtcatctgtccttggtcagaattttctcaccctagtactcctactggcctgaccagggctgactgggtattctaatgaggagctgggaagtggggtgacatagctgaccttagtatcaacccccctcttctccaactcttgttttctagtccaggatatgctaaaggacgaagattttctattgtttccaggccctcagaccatccttgctgtcccttcaccctccatgcccctgccatcctcactcacttctcataaatggatctgggggttagagtggaggaaataaaatcctgaagtggttgtcagtgcttgtgggatgcagtggtcttcaggattctccccgcattattatgtagttgttcagaagctgttgctactgcgtctctctgtctgcagggggcacttgttcctgaggtcctcgcctgggtcctgacttctgtagtttctgtgaagacgtggctgtcctgtgggctcctgtgtgtgctggctgcgcctgagctccgagacagctgcccataacctgctaaggtcagggcccagggccccccacagcatggctgagggaccccttcccagtagggctgtcccaagccccactccatggggccaggtttcctggccacttttgttgatagcagatggatcaatattagtaaccccatccaagattgaactgtgaaagagaggttccaggggtatctccctcagtgccagttacttagtgatgtgttacccaggatgcagcaggtgtgtgcaggtatcttgctctctaggcctgtgtgtgtgtgtgagtgtgtgtgtatatgggtgtgggtgtgtttgtgtgtggtggttgtggggggggtgttggaggttctatttcatttaaaaatgtattcatttccctggccccacagatgcttccctccatactttttatttgctctgtttcctcagatttattttgtcttgccccattgcctctccttccttgaactctttccttttcaatctcaactcattcactgctgttgctcatttgcccttttccatgtattttttcctacttaggattttccactctatctttgtggttcatgaggactttgcctcttctcctgcctcattccctgactttctctagttagatgtcagtcctaaataggttttcctcacttcaggcctcacccctcaccttgtttttttgggggctccagggaccaatctggggctggaaatgttaggaggttgccttggtgctgccccagatctgtccagcagggggcagtaagtgatcttggtagtatccctggctgctaagcccttggcaggggtggtcctttctacattcccattcacttaacagctcttttgggattgggtgtttcattccatttctgcccactccctctcctctcctctctggtaggtttaattttatgctttccctgattccagctttctgcttcctgaggactcccgctccccccaccccaaagtttgtctgtggtgttatagtggtaactgcagttcctcctctggaatgtagactgtatatgtttaataactcaccttctctatccttgctcaaaatgtgggataacgcgatgactgtgaccctggttggaaattaaacttgttttatgca

SEQ ID NO: 635 - DNA, 1945 bp, Homo sapiens
acttttggtcgagcggagggcgcgcagctccaccgttgccaagacgccgcgtaaacacccgagcgcgcgcagccaggtgcgctccttggggctgctggctgctgcgtttgcggcgggaggtggtggccgcggtcccacgagaaggggtatttttcgtcagccaagatgggttccaaaaggagaaatttgagctgtagtgaaaggcatcagaaattagtagatgaaaactactgcaaaaaattacatgtccaagctctaaaaaacgtcaacagtcaaatcaggaatcaaatggtgcagaatgaaaatgataaccgtgttcagcgcaagcaatttctcagattattacaaaatgaacaatttgagttggatatggaagaggccattcaaaaggcagaagaaaacaagagattgaaagaactccagctcaaacaagaagaaaaactggctatggaattggcaaaactgaaacatgaaagtctaaaggacgaaaagatgaggcaacaagtaagagaaaacagcattgagcttagagaattggagaagaaattaaaagcagcttacatgaataaagaaagggcagctcagattgctgaaaaggatgccattaaatatgaacaaatgaaacgtgatgctgaaatagccaaaaccatgatggaagaacacaagagaataataaaggaagagaatgctgcagaagacaaacgaaacaaagcgaaagcacagtactatcttgacttagagaaacaacttgaagaacaagaaaaaaaaaagcaggaagcttatgagcagctgctaaaagagaaactcatgattgatgaaattgttaggaagatctatgaagaagatcagttggaaaaacaacaaaagttagaaaaaatgaatgcaatgcgaaggtatatagaagagtttcagaaagagcaggctctctggagaaaaaagaaacgtgaggagatggaagaagaaaacagaaaaatcatagagtttgctaacatgcagcagcaaagagaagaagatcggatggcaaaagttcaagaaaatgaggagaaaaggctacagcttcagaatgcgttgacacagaaattagaagaaatgctgcggcaacgtgaagatttggaacaagtgcgacaagaattataccaggaagaacaagctgaaatatataagagcaagctaaaagaagaagcagaaaagaaattgagaaagcaaaaagagatgaagcaagattttgaagaacaaatggccttgaaggaattagtgctacaggctgcaaaagaggaagaggagaactttagaaaaactatgctagctaaatttgctgaggatgatcgaatagaattaatgaatgctcagaaacaaagaatgaagcagctggaacacaggagggctgtggaaaaacttattgaagagcgtcgccaacaattccttgcagacaaacaacgtgaactagaagagtggcagttgcagcaaaggcggcaaggatttattaatgcaattattgaagaagaaaggctaaaacttcttaaagagcatgctacaaacttactaggctatctccctaaaggagtatttaaaaaagaggatgatattgatctgcttggtgaagagttcaggaaagtatatcaacaaaggagtgaaatttgtgaagagaaatgatatcatcaaaattgggtaaagcatagattttttgtatgttaccactagatgtcagcataacttttgttttacagctcagtggcattaggtatccattgtctgtttggattttgtaaatcatcactgaatttcataacttgtaaacaattatcagatacaaattaattttaatcaagctgttatttttgtactgataatttcaaaatccgatttctacaacactacagagcactgtttgcatccccatcctcaagacagtatatttaccttgactaatacagaactctacccc

SEQ ID NO: 636 - DNA, 1125 bp, Homo sapiens
gcagaaggcaagcccggaggcactttcaagaatgagcatatctcatcttcccggaggaaaaaaaaaaaagaatgggtacgtctgagaatcaaattttgaaagagtgcaatgatgggtcgtttgataatttgtcggaaaaacaatctacctgttatctagctttgggctaggccattccagttccagacgcaggctgaacgtcgtgaagcggaaggggcgggcccgcaggcgtccgtgtggtcctccgtgcagccctcggcccgagccggttcttcctggtaggaggcggaactcgaattcatttctcccgctgccccatctcttagctcgcggttgtttcattccgcagtttcttcccatgcacctgccgcgtaccggccactttgtgccgtacttacgtcatctttttcctaaatcgaggtggcatttacacacagcgccagtgcacacagcaagtgcacaggaagatgagttttggcccctaaccgctccgtgatgcctaccaagtcacagacccttttcatcgtcccagaaacgtttcatcacgtctcttcccagtcgattcccgaccccacctttattttgatctccataaccattttgcctgttggagaacttcatatagaatggaatcaggctgggcgctgtggctcacgcctgcactttgggaggccgaggcgggcggattacttgaggataggagttccagaccagcgtggccaacgtggtgaatccccgtctctactaaaaaatacaaaaattagctgggcgtggtgggtgcctgtaatcccagctattcgggagggtgaggcaggagaatcgcttgaacccgggaggcagaggttgcagtgagccaagatcgtgccactacactccagcctgggcgacaagaacgaaactccgtctcaaaaaaaaggggggaatcatacattatgtgctcatttttgtcgggcttctgtccttcaatgtactgtctgacattcgttcatgttgtatatatcagtattttgctccttttcatttagtatagtccatcgattgtatatccgtccttttgatggccttttgagttgtttcccatttgcggttatgaaataaagctgctataaacaaaaaaaaaaaaaa

SEQ ID NO: 637 - DNA, 1079 bp, Homo sapiens
cgggcgggcgggcgaagctgggctcggggccaagcgaggtctagccggagcgactgtgccccgcctcctgggcggagcgggcggctccccatggtcagagcctcgtgccggctcggcagcgcccggacgccgagcccagcgcgtcggccccccggcgtgcgggcgtctcagagccgcggaggggccgccgggaccgtttcagcgtggcggcgctggtgctggcgttggccctggaggacggccccgagtgatggctggcgcctgcctcccgggtgtctcccgggtacagatggagtcgtcccgcggccgccggcggcaaggtcggcagctgcgaggccaagagagaccccaggacacacacagctgcctcccggtgcgagaagaagaccccggcttgagagtgagatggcgtttaatgattgcttcagtttgaactaccctggcaacccctgcccaggggacttgatcgaagtgttccgtcctggctatcagcactgggccctgtacttgggtgatggttacgttatcaacatagcacctgtagatggcattcctgcgtcctttacaagcgccaagtctgtattcagcagtaaggccctggtgaaaatgcagctcttgaaggatgttgtgggaaatgacacatacagaataaacaataaatacgatgaaacgtacccccctctccctgtggaagaaatcataaagcggtcagagtttgtaattggacaggaggtggcctataacttacttgtcaacaactgtgaacattttgtgacattgcttcgctatggagaaggagtttcagagcaggccaaccgagcgataagtaccgttgagtttgtgacagctgctgttggtgtcttctcattcctgggcttgtttccaaaaggacaaagagcaaaatactattaacaatttaccaaagagatattgatattgaaggaatttgggaggaggaaaagaaacctggggtgaatacttattttcagtgcatcattactgttccagattcctatgatggatggcagactctttaataaattgcttactgatattatcttaaaaaaaaaaaaaaaaaa

SEQ ID NO: 638 - DNA, 3650 bp, Homo sapiens
agcactgctgctctcccggcttcccgctctactccggccgggccgggtccgccacgtctggcgcgctgagcaggcccggccgcgcagcgcctaccctttcctcgctccgggccggcagtgtggggcggcgcgctgggggcgcggcgtgtctggggacatcttgtgatgttggcgagaacaggacatgatctcacatggcgagaagctctttagttccttaatcatttcacggtgccttcggacgctttttttccacctaaaacgtttagtttcagctcagtgatcagctaccccagctcggcgggggagcggaaggcttgaattattccgacctgtgagcggcccctggcaccaaaaaaaaaaaaaaaaaaaaaaaaaaaagaaaaaaaaaggcacaaaaaagtggaaacttttccctgtccattccatcaagtcctgaaaaatcaaaatggatttagagaaaaattatccgactcctcggaccagcaggacaggacatggaggagtgaatcagcttgggggggtttttgtgaatggacggccactcccggatgtagtccgccagaggatagtggaacttgctcatcaaggtgtcaggccctgcgacatctccaggcagcttcgggtcagccatggttgtgtcagcaaaattcttggcaggtattatgagacaggaagcatcaagcctggggtaattggaggatccaaaccaaaggtcgccacacccaaagtggtggaaaaaatcgctgaatataaacgccaaaatcccaccatgtttgcctgggagatcagggaccggctgctggcagagcgggtgtgtgacaatgacaccgtgcctagcgtcagttccatcaacaggatcatccggacaaaagtacagcagccacccaaccaaccagtcccagcttccagtcacagcatagtgtccactggctccgtgacgcaggtgtcctcggtgagcacggattcggccggctcgtcgtactccatcagcggcatcctgggcatcacgtcccccagcgccgacaccaacaagcgcaagagagacgaaggtattcaggagtctccggtgccgaacggccactcgcttccgggcagagacttcctccggaagcagatgcggggagacttgttcacacagcagcagctggaggtgctggaccgcgtgtttgagaggcagcactactcagacatcttcaccaccacagagcccatcaagcccgagcagaccacagagtattcagccatggcctcgctggctggtgggctggacgacatgaaggccaatctggccagccccacccctgctgacatcgggagcagtgtgccaggcccgcagtcctaccccattgtgacaggccgtgacttggcgagcacgaccctccccgggtaccctccacacgtcccccccgctggacagggcagctactcagcaccgacgctgacagggatggtgcctgggagtgagttttccgggagtccctacagccaccctcagtattcctcgtacaacgactcctggaggttccccaacccggggctgcttggctccccctactattatagcgctgccgcccgaggagccgccccacctgcagccgccactgcctatgaccgtcactgacccttggagccaggcgggcaccaaacactgatggcacctattgagggtgacagccacccagccctcctgaagatagccagagagcccatgagaccgtcccccagcatcccccacttgcctgaagctcccctcttcctctcttcctccagggactctggggccctttggtggggccgttggacttctggatgcttgtctatttctaaaagccaatctatgagcttctcccgatggccactgggtctctgcaaaccaatagactgtcctgcaaataaccgcagccccagcccagcctgcctgtcctccagctgtctgactatccatccatcataaccaccccagcctgggaaggagagcttgcttttgttgcttcagcagcacccatgtaaataccttcttgcttttctgtgggcctgaaggtccgactgagaagactgctccacccatgatgcatctcgcactcttggtgcatcaccggacatcttagacctatggcagagcatcctctctgccctgggtgaccctggcaggtgcgctcagagctgtcctcaagatggaggatgctgcccttgggccccagcctcctgctcatccctccttctttagtatctttacgaggagtctcactgggctggttgtgctgcaggctccccctgaggcccctctccaagaggagcacactttggggagatgtcctggtttcctgcctccatttctctgggaccgatgcagtatcagcagctcttttccagatcaaagaactcaaagaaaactgtctgggagattcctcagctacttttccgaagcagaatgtcatccgaggtattgattacattgtggactttgaatgtgagggctggatgggacgcaggagatcatctgatcccagccaaggaggggcctgaggctctccctactccctcagcccctggaacggtgttttctgaggcatgcccaggttcaggtcacttcggacacctgccatggacacttcacccaccctccaggaccccagcaagtggattctgggcaagcctgttccggtgatgtagacaataattaacacagaggactttcccccacacccagatcacaaacagcctacagccagaacttctgagcatcctctcggggcagaccctccccgtcctcgtggagcttagcaggcagctgggcatggaggtgctggggctggggcagatgcctaatttcgcacaatgcatgcccacctgttgatctaaggggccgcgatggtcagggccacggccaagggccacgggaacttggagagggagcttggagaactcactgtgggctagggtggtcagaggaagccagcagggaagatctgggggacagaggaaggcctcctgagggaggggcaggagagcagtgaggagctgctgtgtgacctgggagtgattttgacatgggggtgccaggtgccatcatctctttacctggggccttaattccttgcatagtctctcttgtcaagtcagaacagccaggtagagcccttgtccaaacctgggctgaatgacagtgatgagagggggcttggccttcttaggtgacaatgtcccccatatctgtatgtcaccaggatggcagagagccagggcagagagagactggacttgggatcagcaggccaggcaggtcttgtcctggtcctggccacatgtctttgctgtgggacctcagacaaaaccctgcacctctttgagccttggctgccttggtgcagcagggtcatctgtagggccaccccacagctctttccttcccctcctctctccagggagccggggctgtgagaggatcatctggggcaggccctccacttccaagcaagcagatgggggtgggcacctgaggcccaataatatttggaccaagtgggaaacaagaacactcggaggggcgggaatcagaagagcctggaaaaagacctagcccaacttcccttgtgggaaactgaggcccagcttggggaaggccaggaccatgcagggagaaaaag

SEQ ID NO: 639 - DNA, 2502 bp, Homo sapiens
gactgcactgctgtgggaaacgctgtcctgaatggtgctgcagctcccacccaccttgtgcacccatctaccatcaggaagctctccatgtgcaaactggaatttagccagctggaatttattcctgtccctctgggaagctgtggtttgcttcttctggcctcccattctcttaaatgagatcagcagagtaggaaagggtgagaaggcattgcctatcacatgaagtgatggggccagagaccctaaggacccttccttctacgaatggttggtcaccttttgaggactgcaaagacttaggcatgtcataggcagactaaaggaagaatacacagttcctcttggactgctacatcttttgtaagcccttttccaggactaaactaagttcaattaagttctttaaaacagtaaattccgggatcagccttcgggccctcttctctgaccaattttatagcgtaccctcgttttttggtgtgctgcagtggtcatgatttttgcttgagaagtctgcaaacatagacacttctcttgaggttccatgtttatggatgatgttgtgttaatcctagccaattctgtgctattgggaattctccaatcatgaacactggggtggggaggaagacacaaatgccatgtgaggaaaggaaaatgcagtcgtctttttggaggatggctttttaaatacacccttcttagcaggctgcttaaaatacacaggagaaaaggctctgctgggcaatgaaccagatgaaaagctgcccacccagatcactgttgcaggttgactatttggcttagcaactcatgggatttcagaggcccttgaagtttttggtgagtatagtgtgggggagagcaggctttttaaaagggcgggggggcatcctcctctgtgtagcactgtttaagatcactgtaagttgaccagtttttgtttacttttagcttctcttagaggcactcctctattgcttggaagtctgttatggggtataaggtgctacatggtagctgtttccccccttgctaaaatgacatggatgaattttaaaaatgaaatgagaccttctagaggcaaccattatctgcagtgcctggctggtcgactttagagtaggaagctcttgaatccaggagcaaattagttaaaaccccaagttccagtggtaactggtataagcaaaatggaaactgaggggctatggaggaatctctgtttgttggaacgtaatgaaaccatggaggaaataccagatttaagggctaagaagctggcccgatgggtaaatcagtgttgggagtcaggttcttggcccttcaaggacttgctatgcaacctcaggcaaattcctctcagtctttgtgctttctctttcttgtctcatctgacagttatgaatataacgtaaaataaagatcaactatcattgataacactgttcctgcaaatgaatactgtgaaacatcagggaaagaggaaaaaattaagccacaagaaaaccatttggcagtgtccttaaactttttttggggggggggcagtgtaaaacatgaaacctagtaagataattgggccattagatcttcatcattaaactcactttgcaaggaagtgtaagaaatctgtaaaacaaaagacattcctatctcagaagctcaaactggtgatttccaactgcctctttacaggagggggctcaaggcttctgatgagcaaaggctgtgtgttgtatgacagtccactctctgcacctacacttccacgtgccacgactgacaacttggttataaccatgaaaataatgaccatacctccccagccagcagggtctggaaggcctgaggaggctcatttttaaacactgcactttaaaaattggaaaccgtgagatgaagaaaaattcaattaagcggaaatgagttttgttttattgcctgctgctgaagggctctgggcatgctgaaagctaaatgaaaagcacatcactggctctctctttcttggattggtcaattggccctttttgcagtagttgctccaactgttctaaacagtgagtgactggagccaaaaagagagagctcagcaaagccatcccatccacactctgcttggtaggaccacactaaaagcacagtttcatgctgctagctctggtaaggagacagctgcaggtttgggaggtgcaccaagcattcctttgcttagggaggcagagcacaggtgaacagaggaaggacacccccactgtcatctattgcccaccgagaggcaagaatcacaccaactttcccacttgaggactgtgttcggccaaacaagcaggttcagggctgcgggattccagaagttgctctgagcttgcaatcagacctcaaagccccagatcccctcagctctggatcgttgccctcatccttcacaatgtaaattttgtacagttaaagagaaatgaagtctcgtttcctggggaaaaaaaaaaaaaaaaa

SEQ ID NO: 640 - DNA, 1493 bp, Homo sapiens
ttgtgcttggtggccctatttttttttttttagagaggccttgagacatacaggtcttttaaaatacagtagaaacaccactgtttacgattatacgatggacattcataaaaagcataatttcttaccctattcattttttggtgaaacctgattcattgattttatatcattgccgatgtttagttcatttctttgccaattgatctaagcatagcctgaattatgatgttcctcagagaagtgaggtgggaaatatgaccaggtcaggcagttggaggggcttccccagccaccatcggggagtacttgctgcctcaggtggagacctgaagctgtaactagatgcagagcaagatatgactatagcccacaacccaaagaagcaaaaattcatttttatcttttgaaatccagtttcttttgtattgagtcaagggtgtcagtaggaatcaaaagttgggggtgggttgcaaaatgttctttcagtttttagaacctccattttataaaagaattatcctatcaatggattctttagtggaaggatttatgcttctttgaaaaccagtgtgtgactcactgtagagccatgtttactgtttgactgtgtggcacaggggggcatttggcacagcaaaaagcccacccaggacttagcctcagttgacgatagtaacaatggccttaacatctaccttaacagctacctattacagccgtattctgctgtccgtggagacggtaagatcttaggttccaagattttacttcaaattacaccttcaaaactggagcagcatatagccgaaaaggagcacaactgagcactttaatagtaatttaaaagttttcaagggtcagcaatatgatgactgaaagggaaaagtggaggaaacgcagctgcaactgaagcggagactctaaacccagcttgcaggtaagagctttcacctttggtaaaagaacagctggggaggttcaaggggtttcagcatctctggagttcctttgtatctgacaatctcaggactccaaggtgcaaagcctgctgcatttgcgtgatctcaagacctccagccagaagtcccttccaaatataagagtactcatgtttatttatttccaactgagcagcaacctcctttgtttcacttatgttttttccagtatctgagataatataaagctgggtaattttttatgtaattttttggtatagcaaaactgtgaaaaagccaaattaggcatacaaggagtatgatttaacagtatgacatgatgaaaaaaatacagttgtttttgaaatttaacttttgtttgtaccttcaatgtgtaagtacatgcatgttttattgtcagaggaagaacatgttttttgtattctttttttggagaggtgtgttaggataattgtccagttaatttgaaaaggccccagatgaatcaataaatataattttatagtaaaaaaaaaaaaaaaaaaaaaaaaa

SEQ ID NO: 641 - DNA, 2036 bp, Homo sapiens
tacaaccatccattcctctgcccttcctccattcatccacccatccctctgtctattcttccattctttcctccatccacctattcacccatacaaccttccatccccccatccatccaaacatccatccatccactgaacaaatccatggcactgccccactggccttcttttatttcctctgtgaaccccttctctcctacctctgagccttcacgtacttcccctcccattcccatatacacccctagggaatacctactcagcttaagaaaagcctcacctaaatcccagtctgaagtaggtcctcctgctattcctctcctgaagaacctcattccctccttttcgacagttgtcatagacatcaccaaacgtttgcttttgggttgatttacttattcctgtctccctgaccagactggaagctccaagagggcaggcattaggtcttccttcagtgcctaccccagagcctacctggcccacagtaggggctccatagggaagtggtgaatgctggcattgagtgaacttagaaagtactgtgtgcagggcacaggcccagatgtcttgtcaggatttgcttctgaatgtgactgcctctcaaggcttagcatctatagaaagagataaagaatgtgtatgcaggattgcaatgcaggatgcgactcaggaaggaggcagggagggatggcatggggagggccagggtgaacatggactgaacctggccctcagtgttcacagctgcataagccactcgatctccatgggccttcatttcctcaccagcaaaatggagctaataaaactagagaggagaaagaaacactattaccataaaattgctttaaattgttcaaatatatcttctgagttctgtgaaaagttttttaagtagataaaattattttaagaactgaaatcaatgtgattcattgatgtaattttttatagacagagccaagtaatggaaattaataaacaactaaaaacatatatttatttaaattgagattgtcatgttattgtaaggaccatgggaaatctacctagaaagaagttcttggcagggtaagtgctcaactgctctgtttttgaattctatttgaatggttttgggtaaacttcattgaggaggtgatgtttaaactaagctgtgaaaaatatgtaggcttccaatattttaacactacaaatattagatacaattttttaacacttttatatactcttctagtttctatggctatgtaacaaactaccccaaaacataatggtatactgcaatcatttatcatgttcacagattctgtggctctagaatctggacagagaatagcaagggcagcttgactctatcctgggatgactgaggcctcagttgaggctcagtctggggctgaaggctggggctgaagtcctctcagggcgcacgtgtttgttcacatgtccagcgttggtgctggttgtcatctgacctcagttcctctccatgtgggctgctcccacatctgcttcggctagattgagcttcctcacaacatggtgactggattccaagggcgagtatagagagtgagagtcaggtggcagctgtatcgtttagatgacctagtctcaaaagtcacatggcatcacttcctgcacattctactggtcaaatagtcacaaggtccctagattcaaggggaattgacctgtgccccatctgtcagtgagaggaatgtccatcatactgtaaaaagagtatgtgaatagtagcaaaatattgatgcagccatccctggagagacacagcctgacatacacatatcatctcatgaaatactcagtacaatctgtgaggaaggagcccttcttaactccattttatagaagaggaaattaaggcttgacaaagtcaaaagttttgtcctagctgggcacagtggcttacacctgtaatcccaatgctttgggagaccgaggtgagagctttaaggccggagttcatgaccagcctgggcaacatagcgagactgtgtctctac

SEQ ID NO: 642 - DNA, 2041 bp, Homo sapiens
cccgtgcaggctgtggagactcccttcccgggggagggggcccccactgccgcaggtgccccctctgcctccaccccggctcctggccagaagctggagggggcttggccaaaaagagggagaaacaactcagctgttctttctagctctgaaatagaaaatgtctgcagacggcggaggcatccaggacacccaggacaaggagacacccccggaggttccagatcgtggacatcctcatcaggaaatgccttctaagctgggggaggcggtaccttcaggggacactcaggagtcactgcacattaagatggagcccgaagagccacactccgagggggcatcgcaggaggatggggctcaaggtgcctggggctgggcacccctaagtcacggctctaaggagaaagctctcttcctgcctggcggagccctcccctccccccggatccccgtgctttcccgagaggggaggaccagagaccggcagatggctgcagcgctcctcactgcctggtcccagatgccagtgactttcgaggatgtggccttgtacctctcccgggaggagtggggacggctggaccacacgcagcagaacttctacagggatgtcctgcagaagaaaaatgggctgtcactgggctttcccttcagcaggcctttctgggcccctcaagcgcacggcaagggtgaggcctcgggctccagccggcaggcaggagatgagaaggagtggagaggcgcgtgcacaggagccgtcgaggtggggcagagggtgcagacctcatccgtggcagcccttgggaatgtgaagcccttcagaaccagggcagggagagtccagtggggcgtcccgcagtgcgcgcaggaagcagcctgcggccggagctcagggccggccaaagactccgggcagccggctgagccagatcgcaccccggatgcagctccgccagaccccagtcccacggagccccaggagtaccgcgtcccggagaagcccaacgaggaggagaagggcgccccggagagtggcgaggagggcctggcccctgacagtgaggtgggcaggaagagctaccggtgcgagcagtgcggcaagggcttcagctggcactcgcacctggtgacgcaccggcgcacgcacacgggcgagaagccctacgcctgcactgactgcgggaagcgcttcggccgcagctcgcacctcatccagcaccagatcatccacacgggcgagaagccctacacctgccccgcctgccggaagagcttcagccaccactccacgctgattcagcaccagcgcatccacaccggagagaagccctacgtgtgcgaccgctgcgccaagcgcttcacccgccgctcggacttggtcacccaccagggcacccacacgggcgccaagccgcacaagtgccccatctgcgccaagtgcttcacgcagagctcggcgctagtcacccaccagcgcacccacactggggtcaagccctatccgtgccccgagtgcggcaagtgcttcagccagcgttccaacctcatcgcgcacaaccgcacacacacaggcgagaagccctaccactgcctcgactgcggcaagagcttcagccacagctcgcacctcaccgcgcaccagcgcacccaccgtggcgtgcggccctacgcctgcccgttgtgtggcaagagcttcagccggcgctccaacctgcaccggcacgagaagatccacaccaccgggcccaaggccctggccatgctgatgctgggggcggcggcggcgggggctctggccacacccccacccgctcccacctaggaggccaggaaagggggagcggggcgcccagggccactggaacagccccactggagtcaaggctccgagggaggagagaggggctcgggaagggagctggggcggtgagggcatggggtgaggcatggcgatgggggagggcgagggcgagaaagggcaggcactctgcgaattaaaggccttggacttgaaaaaaaaaaaaaaaaaaaaaaaaaa

SEQ ID NO: 643 - DNA, 2845 bp, Homo sapiens
aaaaaagcgggacaggtccagcggttgttctgtgtgaagtcgcgcggcttccacccacgcagtgttctaagtgaaggccagaaactcgctcgccatgtcggctgcagaggcggggggtgttttccacagagccaggggcaggaccctggacgcgtttcccgcagaaaaggaaagcgaatggaaaggcccattctacttcatcctgggcgcagacccacagtttgggctgatcaaggcctggtccactggggactgtgacaatggcggcgacgaatgggaacaggagatccgtctaactgagcaagccgtccaggccatcaacgagctgaaccccaaacccaaattcttcgttctgtgcggcgacctcatccacgccatgccagggaagccgtggcggacggagcagacggaggacctgaagcgagtgcttagggcagtggacagggccatcccactggtccttgtcagcggcaaccatgacattggcaacacccccacggccgagaccgtcgaggagttctgccggacttggggagatgactacttcagcttctgggtcgggggcgtcctgttcctggtcctcaactcccagttctacgagaacccctccaaatgccccagcctgaagcaggctcaggaccagtggctggacgagcagctgagcatcgcgaggcagcggcactgccagcatgccatcgtcttccagcacatcccgctgttcctggagagcatcgacgaggacgacgactactacttcaacctcagcaagtccactcggaaggagttggcagacaagttcatccacgcaggtgtcagagtcgtgttctcaggccactaccacaggaatgccgggggtacctaccagaacctcgacatggtggtgtcatctgccattggatgccagctgggcagagacccccacgggctccgagtcgtggtggtcaccgccgagaaaattgttcaccgatactacagtctagatgagctgagtgagaaaggaatagaagacgatctcatggatttgatcaagaaaaaatgacgctccttcccgttcccgttcacttttcacttgcactatttttttattttgccagaaacagcagctgcacacaacctcttgctgaaatataaaaatagcccaggcaggtttgtgaatttatgtccttttgcataaatcagagagctggggccctgtcctgaattatattcaaaatagaactgcatttcctttaaaatggagcgaatgatcctggaaatcagtttttaaaatattagactatctctgcatggatgtttgaataaattctcctaatgctgtgtttctcaactccacttttgaattggattgtattctggttagcatatggtcaaagtctgcctatcgacctcaattccaatctgacagccaagtatgatctttgataattccttaaacaaactacacctgattgtattaaattgtggtcacgattcccaaaacgctaggcaaaacaaagttcatctcctttcctttccagcggaacgaacagctgtctgccttgttgtgagagccatgcagacttattttgacaaggagccaagtaggcaccatttactgttcaattctgagacttctgatgataggaacagaatgcagttgatacagctcggagcttaaatttgccttcctgggtgcctagaaaagtcacctttgcacataaattggccatttctgaaaatctcctccaagagactgaaaccaaagctctaaaacgccgcttcttcagtctctggggagcacgttgagttggttcacatccacattctggctgtgtagccactccacagatgggtggtctcttgggatcagaatgcccctccactcatgagactctccattttgtccactttgacaggaaaagtgggaatgtatgcagagctctcaaaagaaacaaaaaaggccaaaacggtgccttcagccacatcctctgaattggccctgacttggactaaatgcactaatgcgaaatcccttgacaaaagcgcataggttatttcaaaccagcattgttttttatgtaacctgttttaccgcatcttctcagcagcttctgaccactgctcaattttctcctttacagccattgttctggtggacaaataacctaggtactccaaatcctggcaggaaaaatatacagcattatgaaacagcactcagtaatcctaaaatgatttccaaagctggttacacatgacctgcaaagtctattaaattaaaagactttctcattacagagtttagtcaacgtagcaaaaccatgggaaattaaatggaaagataattaaatatgtaaattcataaggaacaaaagacgagaagttaattatacaataggctggtgacaccagagttcattgttatgtgccacaagaaaattaaattttttaaaaaactagaacgctcttcttttagtgttttgctgaaatcctgttttgtatttgtttctttacaacaggtgtaggtataggaggtcaagaaaaggagttcggtaaagggcatagctaataacaaccacacattgggccaggcgcagtggcttacgcctgtaatcccagcactttgggaggctgagacgggcagatcacctgagatcaggagtttgagaacagcctggccaacatggtgaaactccatctctactaaaaatacaaaaattagccaggcatgctggtgcacacctgtaatcccagctactcgggaggctgaggcaggagatcgctggaactcaggaggcagaggttgcagtgagccaagatcatgccactgcactccagcctgggcaacagagcaagactctgtctc

SEQ ID NO: 644 - DNA, 2646 bp, Homo sapiens
atctagcgcccccgtcaggacgtgcgaaaagcgacggcgcagcacggtgcggcgcagctcctgctcgcctttcccttcgctgggcgagaggtgtctatggggcacccgctgccgccgccgctaccgccaccgccaccgccaccgccgccgagtgctgtctctatggcgaggaggaggaggaggagcgcgagctcagcgacacaagtacataaataaaggataaaatattttatgaaacaaatcttcaatcaagtataacattttgatgcttggcatctagactcccttgtgccctcactatgccagcggcaactgtagatcatagccaaagaatttgtgaagtttgggcttgcaacttggatgaagagatgaagaaaattcgtcaagttatccgaaaatataattacgttgctatggacaccgagtttccaggtgtggttgcaagacccattggagaattcaggagcaatgctgactatcaataccaactattgcggtgtaatgtagacttgttaaagataattcagctaggactgacatttatgaatgagcaaggagaataccctccaggaacttcaacttggcagtttaattttaaatttaatttgacggaggacatgtatgcccaggactctatagagctactaacaacatctggtatccagtttaaaaaacatgaggaggaaggaattgaaacccagtactttgcagaacttcttatgacttctggagtggtcctctgtgaaggggtcaaatggttgtcatttcatagcggttacgactttggctacttaatcaaaatcctaaccaactctaacttgcctgaagaagaacttgacttctttgagatccttcgattgttttttcctgtcatttatgatgtgaagtacctcatgaagagctgcaaaaatctcaaaggtggattacaggaggtggcagaacagttagagctggaacggataggaccacaacatcaggcaggatctgattcattgctcacaggaatggcctttttcaaaatgagagaaatgttctttgaagatcatattgatgatgccaaatattgtggtcatttgtatggccttggttctggttcatcctatgtacagaatggcacagggaatgcatatgaagaggaagccaacaagcagtcatgacatgaaatagtccttttatttttatttcgagctacacacatgcttgtatataggttttatctctggttgaatccctcgaacaatagacagtacctttcccccccctttcatggcccattttattgtctgcctttcagtactaagtatgaccgttcctatctcagatcttaataaaaagaaaaaaaaaaacgcattcaggttaaatttggccttaatttaatatacttgttagcaagcgtgtgtgacagagagtggggaaagctacatcattgaatattttgataaactttaccgacttgagtttggtttatttttcccttttcctaaattaactagcactgactgtaatttatttccctgtttcacgtctctcccttccattctgcaggagttttagctatttgagatcgtggaccatcagttttgcactttagagagtgtttctgactctaaacctgttttatcagaaaatttgttttttcttgatcttagctggaaaaatctgccaactttacacagtatttacttggttttgacccacagaatatagcacgttgtgcaaactgtcgattcagcgaaacttaaaaaagacaagaaactactgaggagcttagtaactgctgtttctgtacgtagtgtttaatcttccaagcacatctagtgtctgtcagtttctaattggcatgtgtaggctgctctgtgactgaagaattttcaaaccagctttacacccttcaggaaaaatcccttgtgattggatgtttactatctgccaggaaactggtactcaagatgttgaagctacagttattttatgatagcacacttcccttgatctgcttatttttattccatcaccatttaccctttttttttttttaaattttgtagccattcttatgatgctcttgatttgttggttacacaaatcaattttattaaaaatccaaagataagtctttaggtatattttgtaccaaattaaattagaagacaaaaattgtgctttcatagttgctacaaaggtaaataatggagagatttggtacaaaacaacaaaatatatatatattctcatatatatatatatagctgataaaattacctgaggagtgtaatgcttatttttttgtgtatatctttgcaatctattttatatatattgacaaaagagactgtgaaatacttagccatgcagaatatgtgaccagaccagagcatgtgtaggaagactttacggtaatcattaactctaccccgaaatgatggactacaagttataatgtgtgttacctacacttcaatcagtaatattagcaaatctccaaatgttagtcacattggtttgtctcccttgtacattctttattcatgatattacagtgctgtaactgggtggtcctttttaaacaaaacattatttgcaaaacagagggtattatttgtttttaaagcttttgtaaataaaggcttcaaaatgttttcttat

SEQ ID NO: 645 - DNA, 1848 bp, Homo sapiens
tgcaaatattccaaagacatgattgtaagcctttgttccctgtaaaagattgctctgtattaaaacaaatccaccaaacaacaagtcatagacccgttagaaaccagcattctaaagcatggtttaagtgtgaacaggtgtttgtagcttatctgagactgacagtaggtaaaggggccaaggagagactgctacatggtggtacccaagataattctctgaagagagagacttttgtgtgaggaagacatttattatacagagtgatttattgcaattcttagctactccatcaagctagacttgtcaccatgtcccattaaaagggtttaagaagaattctttctcagaatcctgcattacagtagcatctgcaataaggagaaaattttcttctgggaatcactccaggaaaccttgacccatcctctacttagtcactcttatagagccctgcattttcttttgtagcatttatgacatgtgtaatgttacatttgtttgtgggattatttaaggaatgtctgtcatgtgagacaataagctttatgagtacaggcacctcttctgtcttatttcctatgccccagcacagtccctgacatctagtagaccttcaaaaagttttacggaatgaatgagtgaacaaatgatgcaaagtgttggttgcaggatatctctctcagtcttccaattcttaggagatcagaggcaagagctggtggcctttcaccgcctggctacagtgtactactccctgcacatgtatgagatggctgaggactgctacctgaagaccctgtccctctgtccaccatggctgcagagtcccaaggaggccctgtactatgccaaggtgtattatcgcctgggcagactcaccttctgccagctgaaggatgcccatgatgccactgagtacttccttctggccctggcagcagcggtcctgctgggtgatgaggagcttcaggacaccattaggagcaggctggacaacatctgccagagccccctgtggcacagcaggccctccgggtgctcctcagagagggcgcggtggctgagtggtggtggcctggccctctgaggaaagctgtcctgtctctggacatttggcatggccagactctgaccccactgccctaggctcttaaatactcattgggagggtccgagtccttacctggcctagccccctcatttcacaagaagaagaatgaagtccaggaggagaagggctcattgcaggccacagaaagatttgatggtgcagcgatgagaattcctggttccaggctttgcatctggagcctttaccggttgactgttgccttccacacaaacagcctctgaaaagcactttctccatacataattctggagaagatgagggatcttgccctccaggagccttccttcctcccccaatgaggaaatcagtcactgcactggtgcaaaggcaagcagattggaatttctgctcttcaccgattttctcagggaaagaccccttccccttgccagcagaggaacctgtagttttttccatttctttcttcagaaccaaagtatgtatcactcctcatgctcacagggattgacaggagagaattcaccaggatcttagctcaaaagacacagcctcagaatggccagatggattgcacgaaacctgacttggattcaccatcttcctcctgccataaggctgtgctcccacataacctcccagaagctccagggaagctttccaagagcaaaggcttggaaattgaatgttaagaaaattatgacataaattacatgtaaatagtgtatatgattaaatattgtccagttacattt

SEQ ID NO: 646 - DNA, 3649 bp, Homo sapiens
gcggcaagccccgcctcagcccctctggcaggctcccgccagcgtcgctgcggctccggcccgggagcgagcgcccggagctcggaaagatgcggcgcccgcggcggcctgggggtctcgggggatccgggggtctccggctgctcctctgcctcctgctgctgagcagccgcccggggggctgcagcgccgttagtgcccacggctgtctatttgaccgcaggctctgctctcacctggaagtctgtattcaggatggcttgtttgggcagtgccaggtgggagtggggcaggcccggccccttttgcaagtcacctccccagttctccaacgcttacaaggtgtgctccgacaactcatgtcccaaggattgtcctggcacgatgacctcacccagtatgtgatctctcaggagatggagcgcatccccaggcttcgccccccagagccccgtccaagggacaggtctggcttggcacccaagagacctggtcctgctggagagctgcttttacaggacatccccactggctccgcccctgctgcccagcatcggcttccacaaccaccagtgggcaaaggtggagctggggccagctcctctctgtcccctctgcaggctgagctgctcccgcctctcttggagcacctgctgctgcccccacagcctccccacccttcactgagttacgaacctgccttgctgcagccctacctgttccaccagtttggctcccgtgatggctccagggtctcagagggctccccagggatggtcagtgtcggccccctgcccaaggctgaagcccctgccctcttcagcagaactgcctccaagggcatatttggggaccaccctggccactcctacggggaccttccagggccttcacctgcccagctttttcaagactctgggctgctctatctggcccaggagttgccagcacccagcagggccagggtgccaaggctgccagagcaagggagcagcagccgggcagaggactccccagagggctatgagaaggaaggactaggggatcgtggagagaagcctgcttccccagctgtgcagccagatgcggctctgcagaggctggccgctgtgctggcgggctatggggtagagctgcgtcagctgacccctgagcagctctccacactcctgaccctgctgcagctactgcccaagggtgcaggaagaaatccgggaggggttgtaaatgttggagctgatatcaagaaaacaatggaggggccggtggagggcagagacacagcagagcttccagcccgcacatcccccatgcctggacaccccactgccagccctacctccagtgaagtccagcaggtgccaagccctgtctcctctgagcctcccaaagctgccagaccccctgtgacacctgtcctgctagagaagaaaagcccactgggccagagccagcccacggtggcaggacagccctcagcccgcccagcagcagaggaatatggctacatcgtcactgatcagaagcccctgagcctggctgcaggagtgaagctgctggagatcctggctgagcatgtgcacatgtcctcaggcagcttcatcaacatcagtgtggtgggaccagccctcaccttccgcatccggcacaatgagcagaacctgtctttggctgatgtgacccaacaagcagggctggtgaagtctgaactggaagcacagacagggctccaaatcttgcagacaggagtgggacagagggaggaggcagctgcagtccttccccaaactgcgcacagcacctcacccatgcgctcagtgctgctcactctggtggccctggcaggtgtggctgggctgctggtggctctggctgtggctctgtgtgtgcggcagcatgcgcggcagcaagacaaggagcgcctggcagccctggggcctgagggggcccatggtgacactacctttgagtaccaggacctgtgccgccagcacatggccacgaagtccttgttcaaccgggcagagggtccaccggagccttcacgggtgagcagtgtgtcctcccagttcagcgacgcagcccaggccagccccagctcccacagcagcaccccgtcctggtgcgaggagccggcccaagccaacatggacatctccacgggacacatgattctggcatacatggaggatcacctgcggaaccgggaccgccttgccaaggagtggcaggccctctgtgcctaccaagcagagccaaacacctgtgccaccgcgcagggggagggcaacatcaaaaagaaccggcatcctgacttcctgccctatgaccatgcccgcataaaactgaaggtggagagcagcccttctcggagcgattacatcaacgccagccccattattgagcatgaccctcggatgccagcctacatagccacgcagggcccgctgtcccataccatcgcagacttctggcagatggtgtgggagagcggctgcaccgtcatcgtcatgctgaccccgctggtggaggatggtgtcaagcagtgtgaccgctactggccagatgagggtgcctccctctaccacgtatatgaggtgaacctggtgtcggagcacatctggtgcgaggactttctggtgcggagcttctacctgaagaacgtgcagacccaggagacgcgcacgctcacgcagttccacttcctcagctggccggcagagggcacaccggcctccacgcggcccctgctggacttccgcaggaaggtgaacaagtgctaccggggccgctcctgccccatcatcgtgcactgcagtgatggtgcggggaggaccggcacctacatcctcatcgacatggtcctgaaccgcatggcaaaaggagtgaaggagattgacatcgctgccaccctggagcatgtccgtgaccagcggcctggccttgtccgctctaaggaccagtttgaatttgccctgacagccgtggcggaggaagtgaatgccatcctcaaggccctgccccagtgagaccctggggccccttggcgggcagcccagcctctgtccctctttgcctgtgtgagcatctctgtgtacccactcctcactgccccaccagccacctcttgggcatgctcagcccttcctagaagagtcaggaagggaaagccagaaggggcacgcctgcccagcctcgcatgccagagcctggggcatcccagagcccagggcatcccatgggggtgctgcagccaggaggagaggaaaggacatgggtagcaattctacccagagccttctcctgcctacattccctggcctggctctcctgtagctctcctggggttctgggagttccctgaacatctgtgtgtgtccccctatgctccagtatggaagaatggggtggagggtcgccacacccggctccccctgcttctcagccccgggcctgcctctgactcacacttgggcgctctgccctccctggcctcacgcccagcctcctcccaccaccctcccaccatgcgctgctcaacctctctccttctggcgcaagagaacatttctagaaaaaactacttttgtaccagtgtgaataaagttagtgtgttgtctgtgcagctgcaaaaaaaaaaaaaaaaaaa

SEQ ID NO: 647 - DNA, 2472 bp, Homo sapiens
agctggagcgttcggtggacagtgagcatgcgtaccatatctgaagttcgtaaattgaaattgaacatgcgtaattaatctttctgaataggaaaaaatatatacacaacaaaactctccgtttatggaacatgcgcatttgttctcagtaagtttttcgttttgaaagtgagcatgcgcatggtgagtaggttggtccgaagtttgaaccggacagaagcgctggtcggcgtctggcggttgtttttagaggtaatacacctagtttgtggctcagcatgtcaattgtaacagtgcaacttggtcagtgtggcaatcagattggttttgaagtttttgatgctttgcttagtgactcacacagttcccagggactctgctctatgagagagaatgaggcatatcaagcatcttgcaaagaaagattcttcagtgaggaggagaatggagttccaattgcccgggctgttcttgttgacatggaacccaaagttatcaatcaaatgctgtcaaaggctgcccagtctggccaatggaaatatggtcaacatgcatgcttctgtcaaaaacaaggttctggaaacaactgggcatatggttactctgttcatggacccaggcatgaagaatctataatgaacataatccggaaggaagtggagaaatgtgactctttcagtggttttttcatcataatgagtatggctgggggcacaggatcaggattaggagctttcgttacacagaatttagaagatcagtactcaaactcattgaaaatgaatcagattatttggccttatggaactggtgaggttattgttcaaaactacaactccattttgacactttctcacttgtaccgatcttcagacgccctccttcttcatgagaatgatgccatccataagatctgtgcaaaactgatgaatatcaagcagatctcctttagtgatatcaatcaagtcctcgcacatcagctgggaagtgtgttccagcctacttattctgcagaaagctcatttcactacagacgaaatccactaggagacttaatggagcatttagttccccatcctgaattcaagatgctgagtgttcgtaacattcctcacatgtctgagaattcattggcatacaccacatttacttgggctggcctcctcaagcatttgagacagatgctcatttctaatgcaaagatggaagaaggtattgataggcatgtatggcctcctttatcaggacttcctcctcttagtaaaatgtctctcaacaaggacctgcattttaacacttccattgctaacttggtcattcttcgtgggaaagatgtgcaaagtgcagatgtggagggatttaaagatccagctctgtatacttcctggttgaagcctgttaatgctttcaacgtgtggaaaacccagcgggcctttagcaaatatgagaagtctgcagtgttggtcagcaacagccagttcttagtaaaaccacttgatatgattgttgggaaggcatggaatatgtttgcttcaaaagcctacattcatcagtacacaaaatttggaatcgaagaagaggactttttagacagtttcacgtcattagagcaggttgttgccagttactgtaatctctgatcttgaacaatgggaaaagtataccttaaggcatttctggactaaaatattttcaatactattttctctgtaaagttttcaaagttctccatcctggctaacacggtgaaacaccgtctctaccagaaaatacaaaaaattagccaggcgcggtggcgggtgcctgtagtcccagctactcgggaggctgaggcaggagaatgacgtgaacccaggaggcggagcttgcagtgagccgagatcgcgccactgcactccagcctgggcgacagagcgagactccgtctcaaaaaaaaaaaaaaaaaaaaatgttttcaaagttccattctgttaaagtaaccacgtagaatgctgagtctattctgcatactatgcccacagaaaaggaagaaaactttttaaaatggagaatcgcatgttttcaatgaaaacattcacttggtatttcatttgtaagaaaaaaaaatggtgcttttataaagaactttggggaaacactttgctgaaatgttgggactctggaactagccaagaaaagagaatattctctttgtctacatgttcctaaatctttactccaaaacaactccaaaaacaactcacaaagcatgaaccaaactttcacagcataatttcaagctaaggaattgtaattctgtacttaatatattcatgtttgaaatgaatgctttgaaccacaggagggagatgttgtcaaatgctacagtgtgaacatgtattttgaatattctgtaacagggcaagtttccactctaagcagctatttaaaaataaatatgaggattttggtaataaatgcttatgcttaagt

SEQ ID NO: 648 - DNA, 330 bp, Homo sapiens
gatccccaaagagagcgaattttctggggcaaaggactgtgtgggtcttattttggtctgtgacttctagcccaatgcctggccccaattacactgtggcctatggtggcccctagctcttgctgtgggtttaattgtgggtggatgctcatagctgtgacttttcccagactcatctgtttctttcctggtgagactttgccccaagggctgctgtgagccaagcgtcttccgcagtcttccctccctgtgttttgagctgttccacagcctctcatgacagtgctgcatttatctcactgttagtcagtattctgaatctgcaatcac

SEQ ID NO: 649 - DNA, 137 bp, Homo sapiens
ggacctggaagacaagggggatcaggaagtgagtcttgcagcttgtcactaggaagccttgtttggggtccccatgcccttgaaccaggtgaacagggcggggagctaaggcgagctctggcctcttccgtccccag

SEQ ID NO: 650 - DNA, 1462 bp, Homo sapiens
gagaaaagaaaagaaaactttgcttcactaagtttctcttgccattatctcgttaattcagatctgtacctcattgctgctcacacatatatgtttcttaccttagcctgaaccttctcaggccttgaagttattattctactcttttttttcttttccttttttatggcactagagaatgaaaacctaaggtcttagaaaatcttaacttgaaaaagtctctaactggcatgatttgattacttttttcccctgtggacaaataattttctttcctatataatagatttttagtaagtgaaacctttgctgctgctttcctgggtttacattagttttttcctgcccttaagaataatttatctgtgcttctctgatgactgttaatttctaatagtgcaggaagggatgagcttttgatttcttctcactcccctcctcaccctacttccaaattacacactaacttctaactcttacagcctgttggcacatacacaagatccacgagaccatgctcctcagaagctacccatgtcctttctcaccatggtgtggctcttggagccctgagtatctgtgactacccactccaaaggttgactgtaagaggagagcggccttcttaattttgcatttcttaattttgtttttctccattcctgttttatgacttggccttcagatgcttcctactctggcctcctccttttttcccctaggaattgtttccaggtaacctaccatgtgcacttctcagctgctctgctcacctttgcccaccttcccgtgaccctgagagtacagatccgaataatgtggcctgtgcagagctcagagaactgtgaggactacccatgcctgtcagactctgctcagggacagagatggatgggtaaatggtgctgttggagacatttttatcttcataccaggctctgtttcatccctgcaccccgcacccccactcactcccctgagggggtaaaatgcagaggtggttgacctgaagggtctgattccctccttcccaagccttagggcctaccctggagtgctgcagtgtgtgagagctgctgcttgcttgtttctccactaggcctgctccaaatgcttagccaatctctggagccgacacagttgcctacggggtgacttagcaccaggttccattagctctccaagtgactgtttccacccagtacttttggcgcttgaggatggggggagggggattatttaaaataaataaaatccgaggtggcagtagaggattccttttgctttaaaaatctttggactaaaaaaaaaaaaaaaaagttttttatatataaatatataaagtaaattgttatgtaactattattgtttcttgtatgttctaattttgttttatgatgtaattaaagaaagtatgctgtgaagacttttcattttcctgtgaaaaaaaaaaaaaaaaaaa

SEQ ID NO: 651 - DNA, 2033 bp, Homo sapiens
tttggttaattatttttatataatttcttgaactataatcttttgaagtggatttaaatgttacagacgtgttatgaggttttagccttaatcatctcatctatgccccccacaaccccccaccagtgctagataactttaaacaaacagcttactagttccctgatgagaaccaataggtcatgtagtaggaaccaaaagaaattggggatcatcgtttttactatcttttgaagagtgaaataaaagaattagatttttttttaatggaagaggactttaatatttattccctctaatcttttgtttttattgctaagaaaaaatcttgtaatccatacttcctgatactcagtttttttagtgttaaaacccatttgcctatgcaattataagtaaataattgaattattggcattcttaatatctcttcacttaaaagtgttaagagtgttgtcaacttgttagcaccaactttttgtataggtctttatcttatagtgatctgaaaccgtaattataattggctgtttcagtataggaagaaacacacacacactcatatatatatatcttcctcataatttaaaaaaccgttttgaaataattggaatagttgtaaaagtagagggagtaataattaaaaagagaagtcttcatttttttttccttgtcaaccaaacacagacatttttacctatatcacacagcaagcccttacacattgctggcaagtgttaaagtattcaataatttcaaatcgaaacagagtcttagatcagttacatcttttttttttttttttttgagacggagtctcgctctgtcacccaggctggagtgcagtggcaccatcttggctcactgcaagctccacctcccaggttcatgccattctcctgcctcagcctcccgagtagctgggactacaggtgctcgccaccacacccggctaatttttttgtatttttttagtagaggcagggtttcaccgtgttagccaggatggctaactgacctcgtgatccatccgcctcagcctcccaaagtgctgggattacaggcgtgagccactgcgcctggcctagttacatctttttagtcttgattcagagttgtggctattcaggcatctaatctgaagaaaaaatatttgagctcagcatcgtctaatcataatagttttttttaaatttgctaattattttatttaaagtatatttaagttaaaaagcattaagttcaaacgtgcatgcttatattttaaactgttttccattcatgacatgccaaacttttcctccccagctaactttgcctttctcattaacagaattatgttttaatggttttcattgtcacttgatgctgtggccaaggaattgaaacttactttaaatgataattaagtcaaatacaaatacgttttgaattgttatactgctttttattaccacaggcactctagagctgagtttatgttgtgctcagtaggctagtctctttttctctactaagttaatgaatggtggcctggacttcagatggctagacagttatgtgcagtatctggagggtgtgatgaagcccagaaatattcccagtccttgaatttcgctagttggtaaaatgcgagctccgtttacccttgctaaggctgcctctgcagggtctctccctttataccttcatacccagtcccccaccaagatgaatgctggctggggagcagggctgcctccaggtgaaggtgtcaccagctctggtggctttggactccaggagccacaattgtgtgtaggcactaggcttctgttgggtgtttggatggtgcatttatatttacccacggtaaatataaatttacctttataaatttggtcaagcttcatgccttgcaaaataattggggtgactatatgaggacagaatactatatagtgagccattcaagtgccacttaagtgcagatgtttaagaagatacataaagtgatgaaaatgaatttaacttgaagaaaaaaaaaaaaaaaa

SEQ ID NO: 652 - DNA, 314 bp, Homo sapiens
ccattccaagatgcatcccaagcacctaaagcactgcctggcacatatggacatataataagtaagtgtttgttgaatgaataagtgatgggcatttttggtcatttccagcttttyatttttttaacaatgcttaaaagaatatttttkchaaagracagctttkcttktcctaatgtgtttdtttccttcctattcaaagtattatccaaaagaataactagacataaattttaccattgagagaaaggtttatacactgaagacaaaacmttcctgaaataaataaataaasacactgtaaaaaatacaat

SEQ ID NO: 653 - DNA, 4290 bp, Homo sapiens
gcagggcggggagaggcggtggctgtgggcgtccggccccgaacctgtcagacctggggagccggcctccagcagcgggcgcggcgggcgcgagcacgaccccactctcctgcggccgcgggtggagcagcgcgagcccgcctcgctgagccggccgggggcggggagatgagttgcggccccgcggcagcgccccaggatggggagggacgcgcggcactgccctcgagaactggcgctccggtgaagtaggcgccgccggccgtccgcctcccccaagccgttccgcaccgcggccgctcagcctctgccatggccggctctggcgcgtggaagcgcctcaaatctatgctaaggaaggatgatgcgccgctgtttttaaatgacaccagcgcctttgacttctcggatgaggcgggggacgaggggctttctcggttcaacaaacttcgagttgtggtggccgatgacggttccgaagccccggaaaggcctgttaacggggcgcacccgaccctccaggccgacgatgattccttactggaccaagacttacctttgaccaacagtcagctgagtttgaaggtggactcctgtgacaactgcagcaaacagagagagatactgaagcagagaaaggtgaaagccaggttgaccattgctgccgttctgtacttgcttttcatgattggagaacttgtaggtggatacattgcaaatagcctagcaatcatgacagatgcacttcatatgttaactgacctaagcgccatcatactcaccctgcttgctttgtggctatcatcaaaatcaccaaccaaaagattcacctttggatttcatcgcttagaggttttgtcagctatgattagtgtgctgttggtgtatatacttatgggattcctcttatatgaagctgtgcaaagaactatccatatgaactatgaaataaatggagatataatgctcatcaccgcagctgttggagttgcagttaatgtaataatggggtttctgttgaaccagtctggtcaccgtcactcccattcccactccctgccttcaaattcccctaccagaggttctgggtgtgaacgtaaccatgggcaggatagcctggcagtgagagctgcatttgtacatgctttgggagatttggtacagagtgttggtgtgctaatagctgcatacatcatacgattcaagccagaatacaagattgctgaccccatctgtacatacgtattttcattacttgtggcttttacaacatttcgaatcatatgggatacagtagttataatactagaaggtgtgccaagccatttgaatgtagactatatcaaagaagccttgatgaaaatagaagatgtatattcagtcgaagatttaaatatctggtctctcacttcaggaaaatctactgccatagttcacatacagctaattcctggaagttcatctaaatgggaggaagtacagtccaaagcaaaccatttattattgaacacatttggcatgtatagatgtactattcagcttcagagttacaggcaagaagtggacagaacttgtgcaaattgtcagagttctagtccctaattttatgtattttgggaactcctgccttatttatcctgcagtcacagacttgagagcaataaatgcaaacctaaatgagaaaatggaatccctgacagctgtgtccgtatcaagcatcagtctctcaaacagttgccccagcctgacagtgctagtctctgtttaatggtaaaaggagactttgccataattttcagatgaagatgtttcccaaacactgtttacagaatgagatgtgactctacagatacctcatagaagacaatccaagatcatacttcattaacttgacagagtacgtgtcttaaaggaagcatcaagaattcaatatttgcatttaaaaatactttttaaggccattttatattaagccagtgctggaaaactgaattttttttattatgtataataatctcgacacccagcttctggaattgctgctttctttttacagaaattactacccaacagatttcaggaagtactagtagttatcccaaaagtggaataagcatgtattcctaagtgtttcagaaatgttttatttcacacataagtcttaatgttattgttatgattatactttataaacaaccttttccagatgctacagggttttgaatctcaaagttaacatttttcattatttgtaatcttagaaccaaatctttatttattgtggtcactgttattaaatgatttaggaaatactttcaatattattctgaatggctgaagttagtcttaaactcaaattactatatgatgatttaaaacaaaataaaagagcgaggatgggggttggagtttcaggtttatgtcttcccgacatcacttttatcattcatgaaattgtcttaaaaaagcaagagactgcaaaatgtaaacagtaatcttctgtccctttaagaactgccaacaatttgtacaaaaaatgtggtacgttggttcctgcctccactccaggtcatctgtgtgtttagcctttcagggtaaactctagagggttcagtttataattcccacctttcacatatagttcaacaacattaatccagagagaattttatgttttatgatatgggttatgttttattatatattttatgttttatgatatgggttagggattctccatggactccagaaaccctaaaatacaattttgaggttttccaataataccatagcagaaatgtccaaggggttgggggaagatattactttgagaaaacagaaatgtaaaggatttttgaccttatatatgtgtgtggttttgtttttgtttttgttcttgagagagtctcactctgtcacccaggctggagtgcagtggcgtgacctctgctcactgtaacctctgcctcctgggttcaagtgattcttctgcctcagcctcccaactagctgggactacaggtacaccacacccagctcatttttttgtatttttagtagagacagggttttgccacattggcctgtctggtcttgaactcctgacctcaggtgatccgcctgccttggccttccagagtgctgggattacagcatgagccaccatgcctggcctgtatgtgtgtgttttaaagcactagatagggatggacattaaatctgtgttgcagggaaactaaacagaggtttccaaactgaaggcaacctaattgtaaatgcctgtgttaaagaggcagcttgactgttcatgtttcattttgcaaccattggttttgagattatcttttatgcacatttggagtcccttttcaacagtgacagtttcttacacgaagaatggatatggttattgggctcctctaagaatcagagtagggtaacaatgtaccaggcaaattgtaagttgaaattctagataagcatgcagatgacttacaatataaatgaagaataggaaacattttatcttcttaccaagtaccttactataagtaaacctaagataagaaaacccagatttacctataagattgttgggagttaatggtgtcaataaaaggattgatggtccctctaatgaaacccagtagatgtttgttgaattgaactgaaaatttatgtggccagacacagtggctcatgcctgtaatctcagcatttggggaggcaaaggtggaagtatccctcgaggccaagagttcatgaccagcctggtcttttgtagagaccctgtctctacaaaaatataaaaatcagccaggcgtcgtgcacacctgtagtatcagctacttgtaaggctgtggcagaagtgctttagcccaggaggttgaggctgcagtgagccatgtccacaccattgcactgcagcctgagtaacaaaatgagaccctatctcaaaaacaaaaaggaaaagaaaatatacatgatgggattcctattgtgaagtcatttaaaataatgacttgaatttctcagaaatttcaggagcatataaactatttaaatcaaaatattcttacatatagaaaccaagtaagaataaatgagagatatttcagtggacatctggacatatttatggactttgagtatctagcaagtagaaaggaaaaaaatattcatcatactctaatcatttttttatatctattgagcttgtttcttgtaaacttttctttatcttataaaggcatatctcgcttttgtatcgacctgttccttaaaaaaaaa

SEQ ID NO: 654 - DNA, 2019 bp, Homo sapiens
cgatccaatgggaagaagagatccaatggatcctctatcacgaagatattgagataagaaccaatatggatttgcacccactgcatttgcagccttgaggtcataagcatcctcaggaaaatgcaccaggtgctgctggcaagatggaaaccaacttctccactcctctgaatgaatatgaagaagtgtcctatgagtctgctggctacactgttctgcggatcctcccattggtggtgcttggggtcacctttgtcctcggggtcctgggcaatgggcttgtgatctgggtggctggattccggatgacacgcacagtcaccaccatctgttacctgaacctggccctggctgacttttctttcacggccacattaccattcctcattgtctccatggccatgggagaaaaatggccttttggctggttcctgtgtaagttaattcacatcgtggtggacatcaacctctttggaagtgtcttcttgattggtttcattgcactggaccgctgcatttgtgtcctgcatccagtctgggcccagaaccaccgcactgtgagtctggccatgaaggtgatcgtcggaccttggattcttgctctagtccttaccttgccagttttcctctttttgactacagtaactattccaaatggggacacatactgtactttcaactttgcatcctggggtggcacccctgaggagaggctgaaggtggccattaccatgctgacagccagagggattatccggtttgtcattggctttagcttgccgatgtccattgttgccatctgctatgggctcattgcagccaagatccacaaaaagggcatgattaaatccagccgtcccttacgggtcctcactgctgtggtggcttctttcttcatctgttggtttccctttcaactggttgcccttctgggcaccgtctggctcaaagagatgttgttctatggcaagtacaaaatcattgacatcctggttaacccaacgagctccctggccttcttcaacagctgcctcaaccccatgctttacgtctttgtgggccaagacttccgagagagactgatccactccctgcccaccagtctggagagggccctgtctgaggactcagccccaactaatgacacggctgccaattctgcttcacctcctgcagagactgagttacaggcaatgtgaggatggggtcagggatattttgagttctgttcatcctaccctaatgccagttccagcttcatctacccttgagtcatattgaggcattcaaggatgcacagctcaagtatttattcaggaaaaatgcttttgtgtccctgatttggggctaagaaatagacagtcaggctactaaaatattagtgttattttttgttttttgacttctgcctataccctggggtaagtggagttgggaaatacaagaagagaaagaccagtggggatttgtaagacttagatgagatagcgcataataaggggaagactttaaagtataaagtaaaatgtttgctgtaggttttttatagctattaaaaaaaatcagattatggaagttttcttctatttttagtttgctaagagttttctgtttctttttcttacatcatgagtggactttgcattttatcaaatgcattttctacatgtattaagatggtcatattattcttcttcttttatgtaaatcattataaataatgttcattaagttctgaatgttaaactactcttgaattcctggaataaaccacacttagtcctgatgtactttaaatatttatatctcacaggagttggttagaatttctgtgtttatgtttatatactgttatttcactttttctactatccttgctaagttttcatagaaaataaggaacaaagagaaacttgtaatggtctctgaaaaggaattgagaagtaattcctctgattctgttttctggtgttatatctttattaaatattcagaaaaattcaccagtgaaaaaaaaaa

SEQ ID NO: 655 - DNA, 1864 bp, Homo sapiens
gaatattgtgcatttaaaagagatgaggtttcaccatcttgcccaggctggtctcaaacccctgggttcaagcgatcttcctgcctcagcctctcaaagtacagagattacaggcatgaaccaccgtgcctggtcctatttttaattttttgaggaaactccatactgtttttccataatggttgtactaatttgtattcccaccagcagtgtgcgagggtttcctttcctttacatcatcaccaacacttgttcattgtttttatagtagccgttctaacgagtgctaggtgatatctcattttggtttgttttttatttatctatttttgatggagtatcactctgtcacccaggctagagtgcagtggcatgatctcagctcactgcaacctcagcctcccaaatagctgggattagaggtgtgcactatcacggccagaaaatttttgtgtatttagtagagatggggtttcgccatgttgcccaggtaggtctcgagctcctgacctcaagttcaggtgatctgcccacctcagccttccaaagtattgggattacagacatgagccaccatgcccaccctaattaacagtatttgtcaaattttaatgtgcatcagattcttaggtttcagctggcatctgtttccagctcttggtgctatttgcaaccttgtatcttaggatgaaggcataaaggttttcaagcagcaaaaccttccagggttagataagagtgtttcactgtggatctgtgagcacctatagccactgtgtgcatccctctgggaccccagcagctgcttctgagaaaacagagggatggagaagaggacatcacccagatggtggaaacatctatcaaaagttaggatgtcctctggaaagcctctttgggtgtctgatttcatatctccttcctcatcagagaatggcgtcgcctcctatttgatgagaatttaaacacatctagaacatgtgcttatctttttcctatctcctgtctctgggatcacatcatactgcctccaagaatcctgtccttaacccccttccttagaatttacagcatagcctggaaacaaccaagcattcatctttattctaaagtacctagaacagagctggatctgtgacagatgctcaatggctgtttaatcaaacaggaaaaactcatatttggagtagggagtagggggaggcaaaatggtactctcaatgaattataatattttaaaatttgtcaatagagaatataatacaaaccagagaagcataaaggaaggtcatgctaattttcatgaggtagtttctaactccaggaacaaaatggtgaaagggcattctaagtcaaaggaatttatcatgtaaagacgggagtaacacacacacacacacacacacacacacacacacacacacaccccactctgctacaaccacaacaaacactttgttgttcttcaaatgcaccaagctctcttcagcagtgttttgtagtgcgtataggacatctttgaaatattctggatatttaacctttgtcttcttggcatgttaaaaatatcttctggcggctgggcgcggtggctcacgcctgtaatcccagcactttgggaggccgaggcgggcggatcacgaggtcaggagatcgagaccatcctggctagcacggtgaatccccgtctctactaaaaatacaaaaaattggccgggcatggtggcgggcgcctgtggtcccggctgcttgggagactgaggcaggagaatggcgtgaacctgggaggcggagctggcagtgagccgagattgcaccactgcactctagcctgggtgacagagtgagactgtctcaaaaaaag

SEQ ID NO: 656 - DNA, 954 bp, Homo sapiens
atgggaacagataaccagacttgggtgagtgaatttattctcctcggcctgtccagtgactgggacactcgggtctccctgtttgtcctgttcttggtcatgtatgtggtgaccgtgctggggaactgtctcattgtccttctgatcagactggacagccgactccacactcccatgtatttctttctcaccaacctctcccttgtcgatgtctcctatgccacaagtgtagtccctcagctgctggcacattttcttgcagaacataaagccatcccattccagagctgtgcagcccagttatttttctccctggccttgggtgggattgagtttgttctcctsgcggtgatggcctatgaccgctatgtggctgtgtgtgatgccctscgatactcggccatcatgcatggagggctgtgtgctaggttggccatcacatcctgggtcagtggcttcatcagctctcctgtgcagactgctatcacctttcagctgcccatgtgcagaaacaagtttattgatcacatatcctgtgaactcctagctgtggtcaggctggcttgtgtggacacctcctccaatgaggtcaccatcatggtgtctagcattgttcttctgatgacacccctctgcctggttcttttgtcctacatccagatcatctccaccatcctaaagatccagtccagagaaggaagaaagaaagctttccacacgtgtgcctctcacctcacagtggttgccctgtgctatggtgtggccattttcacttacatccagccccactccagtccctctgtccttcaggagaagttgttctctgtcttttatgccattttaacaccaatgctgaaccccatgatttacagcctaaggaataaagaggtgaagggggcctggcagaaactattatggaaattctctgggttaacatcaaagctggcaacttga

SEQ ID NO: 657 - DNA, 8473 bp, Homo sapiens
gcgtccgctcgcccggaccctgaggctgctgggcccaccctcccggaaccgtccgaccctcggtggcctcggctcgttctgccatctccggtcctaccctggggcggagggtggaaggcagcttccgtcgaagaggagggggctgcggtggccaccgcggcggagcccgagttattttaccaagaaaatggtttgcacgactttgaacatatactatccatgctgatgggacaggatccaatatgaatataaatgatggaggaagacgacgctttgaagataatgaacatacattacggatatatcctggggctatttcagaagggacaatctactgtccgattcctgccagaaaaaactccacagctgctgaggtgattgagtctcttataaacaaacttcatcttgacaaaacaaaatgttacgttctagcagaggtaaaggaatttggtggagaagaatggattctcaatccaacagattgtccagttcagcaaatgatgctgtggccccgaatggctctggaaaatcgcttaagtggagaagactaccgcttccttctgagagagaaaaaccttgatggatcaatccattatggtagcctgcagtcatggctacgggtaacagaagaacgtcgcaggatgatggaacggggttttcttccacagcctcaacagaaagactttgatgatttatgtagtttacctgatttgaatgagaaaactctcttagaaaacctacgagatcgctttaagcatgaaaaaatttatacctatgttggcagtattctaatagttattaacccattcaagtttcttcctatttataaccccaaatatgtcaaaatgtatgataaccaccaactgggaaaacctgagccccacatttatgctgtggctgatgtagcttatcatgccatgcttcagcgcaaaaagaatcagtgcatcgtgatttcaggagagagtggttctgggaagactcaaagcacaaactttcttattcaccaccttactgctctcagtcagaaaggatttgccagtggagtagaacagattattcttggagctggaccagtacttgaggcctttggaaatgcaaagacagctcataataacaattcaagtcgttttgggaagtttattcaagtaaattaccaggaaacaggcactgtacttggtgcctatgttgaaaaatatctactggagaagtccagactcgtttatcaggagcataatgaacggaactatcatgtattctattacctcctggcaggagcaagtgaagatgagagatcagcattccatcttaagcaaccagaggaatatcattatctcaatcagataacaaagaaacccctcagacagagctgggatgattattgctatgactctgagccggattgcttcacggtggaaggagaagatttgagacatgactttgagcgcctacaacttgccatggaaatggtaggatttcttcccaagacacgaagacagattttctctcttctctcagccatactacatttgggtaatatctgttacaaaaagaagacataccgggatgactccattgatatctgtaatcctgaagttctgcctattgtctcagaattattagaggttaaagaagagatgctatttgaagcattagttacaaggaagacggtgacagtgggagaaaagcttattttgccatacaagttggcagaggctgtgacagtgaggaactccatggctaagtctctgtatagtgccctgtttgactggatagtttttcgaattaatcatgcacttctgaatagtaaagatttagagcataataccaagacattgtctattggtgttcttgatatttttgggtttgaagattatgaaaataacagctttgaacagttctgtattaattttgctaatgaacgtttacagcactactttaatcagcatatctttaaattggaacaagaggaatatagaactgaaggtatcagctggcacaacatagattacattgataatacctgctgcataaatcttattagcaaaaaaccaacaggactgcttcatcttttggatgaagaaagcaactttccacaggctacaaatcaaacattgctagacaagtttaagcatcaacatgaagataattcttacatcgaatttccagccgtgatggagcctgctttcattataaaacattatgctggaaaagtaaaatatggggtaaaggatttccgggaaaaaaatacagatcatatgcgcccagacattgtagctcttctgagaagcagcaagaatgcatttatctctgggatgattggaattgatcctgtagctgttttccgatgggcaattctccgagcttttttcagagccatggttgctttcagggaagctgggaaaagaaacattcacagaaaaactggacatgatgatacagcgccatgtgcaattttgaaaagtatggatagttttagctttctccaacacccagtccaccagaggagcttagagattctgcagagatgcaaggaagagaagtacagtataacccggaaaaatcccagaacacctctttctgatctccagggcatgaatgctctaaatgaaaaaaaccaacatgatacatttgatattgcctggaatggcagaactgggattcgccagagcagactatcaagtggcacctccttgcttgataaagatggaatatttgctaattcaactagcagcaaactcctggagagagcccatggaattctcacgagaaacaaaaatttcaaatccaagcctgcccttccaaagcacttgctagaagtaaattctttaaagcacctgacaagactgacactacaagatcgcattaccaagtctcttcttcatttacacaagaagaaaaaacctcccagcatcagtgcccagtttcaggcatcattaagcaagctaatggaaacacttggtcaagcagaaccatattttgtaaaatgcattcgctctaatgctgaaaagctgcccttaaggttcagtgatgtcttggtacttagacagcttcgatacaccgggatgctggaaacagttcaaattcgccaatcaggatacagctccaaatattctttccaggattttgtgagccacttccatgtacttcttccccgaaatattattccatccaaatttaacattcaggatttcttcaggaaaataaatcttaatccagataattatcaagttggaaaaaccatggtctttctaaaggagcaggaacgacagcacttacaagatctgcttcaccaagaggtgctccgcagaatcatattgttgcagcgatggttcagggtcttgctgtgtaggcagcatttcctccatctgagacaagcatctgttattatccagagattctggaggaattacctaaatcagaagcaagtcagagatgcagctgtgcagaaggatgcttttgttatggctagtgcagctgctcttctccaagcttcctggcgtgctcacttagagaggcagcggtacttggagttacgggctgcagccatcgttatccagcagaaatggagagattactataggcgcaggcacatggctgctatttgcatacaagcaagatggaaagcctacagggaaagtaaaaggtaccaagaacaaaggaaaaaaattatccttttgcaatcaacatgtagaggattcagagcaagacaaagatttaaagctttaaaagaacaaaggctaagagaaacaaagccagaagttggattggtgaatattaagggatatggatctctggaaattcagggttcagacccttcagaatgggaggattgttcttttgacaacagaataaaagccatagaggaatgtaaatctgtaatagagagtaatcgaattagccgtgaaagttcagtggactgcttgaaggagtcaccaaacaagcagcaggagagagcccaaagccagagtggtgtggacttgcaggaagatgtgcttgtaagagagagacccaggtccttggaggatctccatcagaaaaaagtaggccgggctaagagagaaagtaggagaatgagagaactagagcaagctatatttagcttagaattgctgaaagttcgttctcttggtggtatttctccttcagaggatcgcagatggtctacagaattggtgcctgaaggccttcagtctccacggggtacacctgatagtgagagctctcaaggaagcttggaacttctgagctatgaggaaagccaaaagagcaaactagagtctgtcatttcagatgaaggagacttgcagtttccatcacctaagatatccagcagtccaaaatttgattcacgggacaatgccctcagtgcctcaaatgagactagcagtgcagagcatttgaaggatggaactatgaaggaaatggtggtctgcagttctgagtctattacctgtaaaccacagctgaaagactccttcatttcaaatagtctacctacttttttttatatcccccaacaagacccactgaaaacaaattcccaactagacacaagtatccaaagaaacaaactattggaaaatgaagacacagcgggggaagctcttactttggatatcaacagggaaactagaaggtatcactgctcaggaaaagatcagattgttccttctttgaatacagagtcttctaatcctgtgcttaagaagttagaaaagctaaacactgagaaggaagaaaggcaaaaacagttgcagcaacagaatgaaaaagagatgatggaacagattcgccagcaaacagatattttagagaaggagcgcaaagccttcaagacaattgaaaagccaagaattggagagtgtttggtggcaccatcttcctatcagtcaaagcaaagagtagagaggccatcctctctcctcagcttaaatacctcaaataagggagaacttaatgtactggggtccctatcattaaaagatgcagctcttgcccaaaaagacagttcctctgctcacttacccccaaaggaccgacctgtcaccgtgttctttgaaagaaaaggaagtccatgccaatctagtactgtcaaggaattatccaagacagacagaatgggcacccagctgaatgtagcctgtaaactctcaaataatcgcatttcaaaaagagaacactttaggccaactcagtcttacagccacaattctgatgacctttccagagagggaaatgctaggcccattttcttcactccaaaggataatatgagtattccccttgtcagcaaagaagccttaaacagtaaaaatcctcaactccataaagaagatgaaccagcatggaaacctgtgaagttagctgggccaggccaaagagagacatcacagcgattttcgtcagttgatgaacaagcaaaacttcataagactatgtctcaaggagagattaccaagttggcagtgagacagaaggcttcagattcagatataagacctcagagagctaagatgagattctgggccaaagggaaacaaggggagaagaagactaccagagtgaaacctactacccagtcagaggtttcgccactctttgcaggcacagatgtgattccagctcatcagtttccagatgaattagctgcatatcacccaacacctcctttgagcccagaactgcccggcagttgccggaaggaattcaaagagaacaaagaaccttctccaaaggctaagcgcaagcgaagtgtgaagattagcaacgtggctttggattctatgcattggcaaaatgactctgtccagatcatagcaagtgtcagtgatttaaaaagcatggatgaatttcttctgaaaaaggtgaatgacctagataatgaagacagcaagaaggatacactagtggatgttgtatttaaaaaagccctgaaggaatttcggcagaatatcttcagcttttattcatctgcattggcgatggatgatgggaaaagcatacggtataaagacctctatgcactatttgaacagattctggaaaagacgatgaggcttgagcagcgtgattcactgggtgaatctccagtgagagtttgggtcaacacttttaaagtgtttttagatgaatatatgaatgaattcaagacttcagattgcacagccacaaaggtgccaaaaacagaaagaaagaaaagaaggaaaaaggaaactgatttggtggaagaacacaatggtcacatctttaaagccacccaatatagcatccctacatactgtgaatactgttcttctttgatatggataatggaccgagcctctgtttgcaaattatgcaagtatgcttgccataagaagtgctgtctgaaaaccacagccaagtgctctaaaaagtatgatccagagctgtcatctcgacaatttggggttgaactgtcccgtttgaccagtgaagaccgaactgttcctttagtagtggaaaagctcataaactacattgaaatgcatggactgtatacagaaggtatttatcgaaagtctggttcgactaataaaatcaaggagcttcggcagggtctagatacagatgctgagagtgtaaatctagatgactataacatacacgtcattgcaagtgtattcaaacaatggcttcgagatttgcccaatcctctcatgacctttgaactctatgaggaatttcttcgagctatgggccttcaggagaggaaggagacaatccgtggtgtatactctgtgattgatcaactctcccgaactcatctcaatacactggaacgcctcatctttcatctagtcaggattgctctgcaggaagacactaatcgaatgtctgctaatgctttggccattgtgtttgcgccctgcattctccgctgccctgacaccactgacccactacaaagtgtacaggacatcagtaagactaccacttgtgtggaactgattgttgtggaacaaatgaataaatacaaggctcgtctcaaagatatcagtagcttggaatttgctgagaataaggcaaagaccaggttgtcactgattcgtagatcaatgggaaaggggcgtattcgtcgaggaaactatccaggtccatcgtctcctgttgtagttcggttgccttctgtgtctgatgtctcagaggagaccttgactagtgaggcagccatggagactgacatcacagaacagcagcaagcagctatgcagcaggaggagagagtactgactgagcagattgagaacctacagaaggagaaggaggagctaacatttgagatgcttgtactggaaccccgtgcctctgatgatgaaacccttgagtctgaggcctccattgggactgctgatagctcagagaatttgaatatggagtctgaatatgctatctctgagaaatcagaaagaagcttagcccttagctccctgaagacagctggcaagtctgaaccttccagcaagttgcgaaagcaacttaaaaagcagcaagactctttagatgtcgtggactcttcggtctcctctttatgtctgtctaacacggcatcatctcatgggaccagaaaactatttcagatttattccaaatctccattctaccgagctgcctcaggtaatgaggccctgggaatggaaggaccattgggccagaccaaattcctggaagacaagcctcagttcatcagcagaggaaccttcaacccggaaaagggcaaacaaaaattaaagaatgtgaaaaactcacctcagaaaaccaaagagaccccagaggggacagtcatgtctggccgcagaaaaactgtggacccagactgcacctccaaccaacagctagcactctttggaaataatgaatttatggtctgaaccggcagatgtgtgtccctccgtggctacagagtggtaaacaaatctcacctttggggctgcgtttcatcacctcgtccacaatagtcaatcctaattgtggtcctgcctcttttctaagcatatggctaagactgtatgtgctgaattcctgggcctcctgcagaagcagaaagcctgctggggatggtgccagctgtgccttggctgttgtatttgaattgagatttttactatacaaagccacctagggcctggggatttgggtcagttgtagttgcctctcccccaccctcttttcccttcccaaaggtgggtgttgaactaggggggatattgctgtcctgagggaccctctcatttctgacatttgaagaaaacgtataaatctttcttaaccgtgaaagcaaaagcctttgggtttattttgggatagttaggagctagggtagaatataatttttttccaaaaacttacttacaaacaaaaagcctaatccctctattttaagatttctgaaaaaacactccatgttatattctggggaaagcaaaaacaaaaaaaaaaaaaaaaaaaaaaaaaa

SEQ ID NO: 658 - DNA, 874 bp, Homo sapiens
gggggtgcaggaagctcaacccctctgggcaccaaccctgcattgcaggttggcaccttacttccctgggatccccagagttggtccaaggagggagagtgggttctcaatacggtaccaaagatataatcacctaggtttacaaatatttttaggactcacgttaactcacatttatacagcagaaatgctattttgtatgctgttaagtttttctatctgtgtacttttttttaagggaaagattttaatattaaacctggtgcttctcactcacagactttgtggtctctctcgggtttgggttcctgcccatagggagtgtggagtggggcacatgaggctcacccagacgcagacccccagacaggtcccttcagctctgagtctcattcattcatctgtaaagtggggattttcgctctcccacccctcgctggaagctggggggcctagacttgggcttggtttcccaaggtgggaagcgagcaggcttttctggctccacagagcctggccttgagtcgggcaggagggtgtggggctgcagggctgctccaaggctctggtgctgaggcgtctcactgcctccaccatgtgctttggctttggctatcagctgggacaccctcccctccactccgcccacaggcccggattgaggccggcgtgctctgtgacaggcagctgctagagcccagattccaggtccaggtgagtcatgatcaggccccaggtaggagaagggcagacagagtgtccaaaagcgtgagagcacgaagtgaggagaaggtggagaagagagaagaggaagaggaagaggaagagaggaagcggagggaactgcggccagggtaaggacaggggagggaat

SEQ ID NO: 659 - DNA, 1758 bp, Homo sapiens
tgcaggtagtaatagcattaaaaaatatactcgtgtgtaaacacatactaattttgaccttgaaagatgaattccttcaagaaaaataaaataatgcttaagataatgtgtacgaaattaaataaaggactttatttacatactacataaggtagcaaactgttgaatgagtttgaaggtatcacttattttttatgcatgtgattttagctttagaaagaaatgcgttatagaaacaagtaatagcaagaaaattgatgtatattttaatgatacattaaaattcccttttaatcataatagttaactctacttactgttttaacatacatttgatttaacaaattgttcagcataacacttctaattaagtttatcaagttgtactgtattagataatcagcagtgtatctggagtatgtttaaagagaacagttcgcaatacaaaaagttacatggagctttacatcttaactttctttgtcaatttaaatgcaatgtataaaaagtttattttgctattgtgaaaaactaaatgtaaaggaaatcacctactttcatgcaggtgtataatcttgaaaaggaaaaatgcttccatgttgaagccagattttctgtagtaaaacttttaaatattattttaaaagaaatatgtatataaatatctctatattctttggaatgatactaaagtctctggtctaggaccataccttatataaaggtataagagaccatgacaatgtctgaaaatggaatagataatgatgccttttatttaaagtggcccacataatatacattgagtactccatctctccaaatgtatttccataatgtgttgaaaacatgctaacatttgtatgatttttatacttctgccgaatagacttagaatcagatgaattgtctgtgtgtcttgcaaaagagttggggacaacttgggcaggcctatgaagtgcatagggagtgtatgtcttctgaatggttttattgttcttgtaatctagcttaaagaaatgttaactgggagggtgctgaggccactcactgcattaattttgtgtgtttagagttctgttgtcaaaagaaaactaatgaataaattagtttgtcattctagaatttaaagttctaagattagtataaagagtatatagattgttaatccccaccagctagactttgaacttaagtcagacttaaagatttgagaaattatttgtgtcatttactagacgtgatttttagttctgtttgattatatttcctacacaaacttcttatttaacaggatagcctactaaattaaatgtttcttatttcacttaactcaattgattaaactgtattctaaaacatttggggtttttccccctattcagttttaatcttggaatatgcatttgtaaattgtgatgtcattgagactatatttatatttgacttggcaacattaacatgtcctaagacttagtgcagagaagcttggcagtacgttctttgacttaaggatggcataaaataatcatttttgaacctgtgtaataaagcttgaaagcagggaaaagaatttccttttcccccttttttgtgttgtctataggaattaacttgggattgttttgtgggtttttgtttgttttaaatgtaaattgagaatcttttataagaaataaaagcattattgggtgcctttgtttgtaaaccaaaaagtaataaatgaatccctatatttccaaaaaaaaaaaaaaaaaa

SEQ ID NO: 660 - DNA, 1583 bp, Homo sapiens
ttttttagatttatcaactaatgagaatgatcgatttaatgaaatttgttatttctacatcagttattttttctccacactttttatatagatacttatcatcagcatttgtctacctatgaacttcatcaagtaaatttagcttcataaacatcataaaaagatcaatgaatactaccacatattcttttaactaaatgggatggtctaggatcttgtaacatattgcacaatgaagtttcctgttgaatgactgtctggctaaaagtacttcttgtccttaaaaatcatattgtacattcattccttcttaagtttcagaaaatttatctaggatatcatcatctgaagattcataacctgagatttcactactacctgcctctttacattcaccatctaataactgtgaaatatctttctttgtcagttttcttctctttgccattatgggtagaaaatgaaatattctgaattttcaaccgtgtttactgaaaccctcaaaaatacaaagataggatttccagccttcttttcaaaagatgagacaataccaccaaccaaaaaaagcctgggacctgatggattcacagccagattctaccagatgtacaaacaagagctggcaccattcctacagaaactattccaaaaaactgaagagaaaggactcctccacaacttattctatgaggccagcatcatcttgataccaaaacctggcagagacacaacagagaaagaaaacttcaggccagtatccttgatgaacattgatgtacaaatcctcaacagaatacttgcaaactgaatccaacagcacataaaaaaggtaatccaccatgatcaagtaggcttcatccctgggatgcaagattggttcaacatacacaaatcagtaattgtgattcatcacataaacagaactaaagaccaaaaactacatgattatctcaatagatgcagaaaagacttttaataaaattcaacatcccttaatgtaaaaaactcttaataaactaggtattgaaggaacatacctcaaaataataagagccatctatgacaaacccacagccaacattgaactgaatgggcaaaagctggaaacattacccttgaaaaccggcatgagacaaggatgtcctgtcttaccacttcaattcaacatagtactggaagtccttaccagagcagtcatgcaagagagagaaataaagggcacccatacaggaagagaggaagtcttctctgtttgcagatgacatgattgtatatctagaaaacccaatagtctcagccgggcacggtggctcacgcctgtaatcccagcactttgggaggccgaggtgggcggatcatgaagtcaggagatcaagaccatcctggctaacatggtgaaaccccatctctactaaaaatacaaaaaattagccgggcgtggtggtgggtgcctatagtcccagctacttgggaagctgaggcaggagaatggcatgaatccaggaggcggagcttgcagtgaactgagattgcgccactgcactcaagcctgggtgacagagcgagactccatctcaaag

SEQ ID NO: 661 - DNA, 129 bp, Homo sapiens
gggaagtcgtgtgtggtgcagcatttcaagtctggagtctacactgagacacagcagaacacgattggagtggactttaccgtgcgttcccttgatattgacggcaaaaaagtgaagatgcaggtgtgg

SEQ ID NO: 662 - DNA, 2344 bp, Homo sapiens
gtctcaggggctgaagtttgtgaggtgtagtattgagtcctgtttgagctattgttctctttttcctgaaaaatggcactgtcaaagagggagctggatgagctgaaaccatggatagagaagacagtgaagagggtcctgggtttctcagagcctacggtggtcacagcagcattgaactgtgtggggaagggcatggacaagaagaaggcagccgatcatctgaaaccttttcttgatgattctactctccgatttgtggacaaactgtttgaggctgtggaggaaggccgaagctctaggcattccaagtctagcagtgacaggagcagaaaacgagagctaaaggaggtgtttggtgatgactctgagatctctaaagaatcatcaggagtaaagaagcgacgaataccccgttttgaggaggtggaagaagagccagaggtgatccctgggcctccatcagagagccctggcatgctgactaagctccagatcaaacagatgatggaggcagcaacacgacaaatcgaggagaggaaaaaacagctgagcttcattagcccccctacacctcagccaaagactccttcttcctcccaaccagaacgacttcctattggcaacactattcagccctcccaggctgccactttcatgaatgatgccattgagaaggcaaggaaagcagctgaactgcaagctcgaatccaagcccagctggcactgaagccaggactcatcggcaatgccaacatggtgggcctggctaatctccatgccatgggcattgctcccccgaaggtggagttaaaagaccaaacgaaacctacaccactgatcctggatgagcaagggcgcactgtagatgcaacaggcaaggagattgagctgacacaccgcatgcctactctgaaagccaatattcgtgctgtgaagagggaacaattcaagcaacaactaaaggaaaagccatcagaagacatggaatccaataccttttttgacccccgagtctccattgccccttcccagcgccagagacgcacttttaaattccatgacaagggcaaatttgagaagattgctcagcgattacggacaaaggctcaactggagaagctacaggcagagatttcacaagcagctcgaaaaacaggcatccatacttcgactaggcttgccctcattgctcctaagaaggagctaaaggaaggagatattcctgaaattgagtggtgggactcttacataatccccaatggctttgatcttacagaggaaaatcccaagagagaagattattttggaatcacaaatcttgttgaacatccagcccagctcaatcctccagttgacaatgacacaccagttactctgggagtatatcttaccaagaaggaacagaaaaaacttcggagacaaacaaggagggaagcacagaaggaactacaagaaaaagtcaggctgggcctgatgcctcctccagaacccaaagtgagaatttctaatttgatgcgagtattaggaacagaagctgttcaagaccccacgaaggtagaagcccacgtcagagctcagatggcaaaaagacagaaagcgcatgaagaggccaacgctgcccgaaaactcacagcagaacagagaaaggtcaagaaaattaaaaagcttaaagaagacatttcacagggggtacacatatctgtatatagagttcgaaatttgagcaacccagccaagaagttcaagattgaagccaatgctgggcaactgtacctgacaggggtggtggtactgcacaaggatgtcaacgtggtagtagtggaagggggccccaaggcccagaagaaatttaagcgtcttatgctgcatcggataaagtgggatgaacagacatctaacacaaagggagatgatgatgaggagtctgatgaggaagctgtgaagaaaaccaacaaatgtgtactagtctgggagggtacagccaaagaccggagctttggagagatgaagtttaaacagtgtcctacagagaacatggctcgtgagcatttcaaaaagcatggggctgaacactactgggaccttgcgctgagtgaatctgtgttagagtccactgattgagactactgcaagcccttgcctctcctcccttgcctttgtctcttcagtcctctcacttattctatttcccaaccccctcccacttgtttgtgtgatctcagaactgtgccaagcagacactgggacaaagggagaatatcttgctcccctcctgagtcagcctggtgttgccctttattccccttatgtgcatatgattaaagagttatttttaaaaaaa

SEQ ID NO: 663 - DNA, 2659 bp, Homo sapiens
ccctgagaggccgtgctcgggctcgcctgctcagctcactccgaaagcctctgctcagacctgcacccagtcacagcagcacagatgtgcaggaggagaccatttccacggaccctccgactcctaggaggcagtcccttagggactggccctaacaacaaatgaggagaagccaagttctctgctttctgcagacagggcctcccctggatgggatcttcctctgaggcgagcttcagatctgctcaagcttcctgcagtggggccaggaggcagggcctgggcaggggagaccagaacctctcggtgatgcctccgaatggcagggctcagacacacacacctggctgggtaagtccctgcagtgaaaaccgagacggtcttttgcctgccacagccccgggcagactctgctctcaccgtggtgccgacatcccaagttttcagactcaccaggacccagtgacagcatctgggtcctcagagctgcatgcggactgtccccagttcagagcattggacagagctgggaactgacagccctgatcaatagtcccaagaggaaggccagccctcctcctcctcggaatcctgggtttctaggaggcagaaaggttttctgagaaacaaggcttttggaaggaaggtggtgcctggctgcatccagaaagtgagagctaaatggagaggctgaacaaaggacgcatgtggagcgcatggggagggaaggctggggtgcagggctccgggcctgctcttctgcgtccaccccggatcctgcttttgtccagatgggcctcggagcaccagtcacttactccaagaagtcgtttcctgtggccaataatgaagatgacgcactcggaagcttgtgggctctgaggagggggtaaggatgcaggggccatgcattcatcccagcacaggcagcgcatggctccggaagcagacacaggccaggcctgggccaggagtctgccaggagccaggagcgcctacacctccctggaggcccacacttctctccccagaagctcacacgcagcgtctgaggtgcagggcccaggtgtgctggggtgacaaagccccgagctgtggtgatgggagggaggaagcgccggtttatgtctgttctttgggctgatttgctgtctctgtctttgtctctaatgtcctttgcaccactgaccttgaggagccttttgttcctcctgtcccagtttggtttccatgggaacctgagtggcagcgtcatcactttgctgaggtgaaatgcccctggatgccatgaatacctaggggaaaacctgccagagaagaataaaccatccaagagacggcgctgcagggcctcacagtctgcttccatttcctctcaggtttcagatcccttagttttgggtgcccaagttcacggagggtgccggggaatagaagctctgtcagtctcgtctggatcttggtcctcagcaactgtctggatcctgacaggtgtgtgataattacttagtgaattcatgggtgtgggccgtgatagaattaagtgatttgatgtcctctcgataaatccaggtaacgacatagggttttttgagtttgaccctctcctgaaatttgccatctgacaaaatgacatcatggcagagttgtaaactgctgtggatgtattttatttaatttctcaaattaaaataaaaggtaacggtacacttaagagtggtcactacagccaagctaattgacacccactgaactttctggaatgggccataggatgctggacaataggacagatttggaatgagcagtcttccattccaactttagtttctgcaaagctgttgagagcatggagccaggctgcggggtctgggttcaaatcctgactctaccacttaggagctgtgtgtacatgggcaggacaactggcctgcctgagtctcagtgtaggtgtctgtaaaatggaatgataatagcttccatctcacagattcactgtgtgggtaaaatgatagatatgaaatgctaagaacagcacctgtacgtagtatgtcctacatatcttactgttatcattagcatattttgtttattccaagatacattttttttggcccatttgatatctatgaaatctaaagattttttttcctgtcttgggagatagaataatgatgtgccttacaatggattgtgttttagattcactgaaattcattattgttgtttttatccctggtctgtaacatgatatttggtaaataacaaggactccatacgttttgcaaagagtaaattctctccctccctactgaggccttggtctaggtctctccaggcctttccttcctggagccacagtgcttagagacaggccactggggtcagcatttgagctcagctatgatcagaaaaaagcaccgttgaggttgcagtgagccgagatcacgccactgcactccagcctgggcgacagagagagactccatctcaaaacaaaaacaaacaaacaaacagaaagcaccgtcgagaaatggctccagcgctgactagcggccacctcatttccccccttgaccactgggccagttgggtggctaggttgcctcattttgcatccttctgtatccccaaatctgaaataaaagctggaaaaaaa

SEQ ID NO: 664 - DNA, 727 bp, Homo sapiens
ctcatactcataatcagtattcaagtgataatgcatgatgttacaaatcagtgtctaaaaatctattaaagcaaattagagcaatggatttaatgtacatcggtattagatccacatgccaactaacctcttaaaactaccacttgttgaatttggtgtgaaaaaagaatattcacagtgatctgaaataatatttttaaatttctctgtgtttcaactatatatctttgtgaggccagattttcttcatttcttaaactaaaaaacatgttcaacagattgaatgcagaggcaggtatgagagtatagctatctaccattaaggcagacactgaagagttttgtaaaaaagtaaaacaatgctattctttttactaaatataattttattcagaaaattttagttctttttctgatgaactatttatgttaatatgactttattagttttaaaatgctacaatttttcttagttttaaatttgcaatatgttaaatatcaatggagatactcccataaaaatgccatttggggtcctcaattatttttaagactcataaaggaatcctaagaccaaaagcttgaaactgctgctctcagtaaataggcaactgtgtatatccaaggttctaatagactctcactatgtataaacacaaaggcctacaactagatttttaaacatttttttttctaaattttgtttttttgtattttttatagaggg

SEQ ID NO: 665 - DNA, 2039 bp, Homo sapiens
cctttgtcattctagctgcctgctgcctccgcagcgtccccccagctctccctgtgctaactgcctgcaccttggacagagcgggtgcgcaaatcagaaggattagttgggacctgccttggcgaccccatggcatcccccagaaccgtaactattgtggccctctcagtggccctgggactcttctttgttttcatggggactatcaagctgacccccaggctcagcaaggatgcctacagtgagatgaaacgtgcttacaagagctatgttcgagccctccctctgctgaagaaaatggggatcaattccattctcctccgaaaaagcattggtgcccttgaagtggcctgtggcatcgtcatgacccttgtgcctgggcgtcccaaagatgtggccaacttcttcctactgttgctggtgttggctgtgctcttcttccaccagctggtcggtgatcctctcaaacgctacgcccatgctctggtgtttggaatcctgctcacttgccgcctgctgattgctcgcaagcccgaagaccggtcttctgagaagaagcctttgccagggaatgctgaggagcaaccctccttatatgagaaggcccctcagggcaaagtgaaggtgtcatagaaaagtggaagtgcaaagagtggaccttccaggcagttgcgtccatgacaccaggaagatgtcagtgtgtgtttttcatttgatttatttatcttggggaaagtgaaaaatgtaatctgcaagttaatgaccctattggcttgtgtacatctatatgctaaaatgacttccccacattgacatttgtgcgccacctttaatcactctggggcaactctcacatcttgctgcatgtacatgtatacggctactattgaagtgtaattgtgagatggactccaacaagcatgtgactgtgagattgtgtgtgggaaaatgtatttaactactctgtgtgtgtgtgtgtgtgtgtgtgcgcacgcgcgcacgcgcacacactcacgcacacacaagcagagaaggcgctgatcttgaactaatcctgcacaggcatccttccctttatagattgattccagcaaaggcggaataaaacaaatttcctatgaagagaatcctgatatgaaacaagtcatgtagtctcatggccgggaatctctccacagatactaacaacttaaacttactactttaggagaaaaaaaaaaacattcaatttcggacactgagttatatatgaaattaattaggctctagtccaacagttgtttacattttaaatagtccatattgaatttaattaaaacaagggatgcatgcagtcaaattgatagtttaattcttcaagtgataatataggaagtttcaccttgcctttgtccaagccccacctattaaaaccctttactcacagtttgaaactgaagcagtaaacttgtttccagacatctttttcagattgtcttaagcccaaagttgcctcacttccactattctcagcagccaaccaggatttggcagctgctccactgttacggttgagggaacagggatcagccctgttagaagtctgtgagcctcaaactctacctgttctctgcaatcatccaaaatttgaaaaagaagctatatccagtgtttcactgccaaacagattcactactcttactgattcttcactgagctttgctagtataagcagagttccaagtctcccctagggttgtctctacatttctttatcattccagtgggtagggtttagctgggggaaggacatttcataagggttagttggactgagcagtatggacatttgcttttttcattacgtactgttgtttttccttgttaggtgtgctttggtggttttaatattattgtgccagggatggggaaatggggggggttgtgtgggaagagtacttattattgtgttttcttcagtgtaattgttcttggtaattgatacctctctgttttatttctctcattctttcaaaataaaactttttgaaatttggagg

SEQ ID NO: 666 - DNA, 2459 bp, Homo sapiens
tcgacccacgcgtccggacaaggaggaggaggaggaggaggtctggctagctgtccctaacgtcatttcctggtctcaactctttaagaccctgacatactctgagattggagtgaagatttctgtgacatgctgggtatctctgcattagccagattggacatatgtaaagggacatcagtatatctggatcatcagattgtgcttcaagaagaccatagggaagaacgcattttcatcttgctgcaaaagttgcaatagaagatctgaaggtttgaatgggccaatgagtatcctcatcattgaagcattctatggaggctcccataaacagctggtggatcttcttcaagaagagttaggagactgtgtcgtttatacccttcctgcaaagaaatggcattggagagcccggacatctgctttatatttctctcagaccattcccatcagtgagcattacaggaccctctttgcaagttcagtgcttaacctgaccgaactggctgcccttcggcctgaccttgggaaactgaaaaagattctgtattttcacgagaaccagttgatatatcctgtcaagaaatgtcaggagagggatttccaatatggatacaaccaaattctttcatgcctggtggctgatgtggttgtattcaactcagtttttaatatggaatcatttctcacttccatgggaaaatttatgaagctgattcctgatcacagacccaaggatctggaaagcatcatcagacccaagtgccaagttatttactttcccatcaggtttcctgatgtgagcagattcatgcccaagcacaaaacaacccatttaaagaagatgctcggccttaaaggaaatggcggtgcggttctgtccatggcccttccttttcagccagagcagagagattcagaggatttattgaagaattttaattcagagtgtgatacacactgtggccttgatactgcacgacaagaatatttgggtaactcattaagacaggaatcagacttgaaaaaatccacctcgtcagataattcaagctctcatcatggtgaaaataaacaaaatctgactgttgatccctgtgacattttgggtggagttgataatcagcaaagactgctacacattgtctggcctcacaggtggttggaagctgtgtactgtgggtgttacccactttgtcctaaagatttggtttatcccgaaatatttccagctgaatatctgtattctacacctgaacagctttcaaaaaggctccagaatttctgcaagagaccagatattataagaaaacatctctataagggtgaaatcgctccgttttcttgggcagccctacatggtaaattcaggtctctgcttacaacagaacctagggaagatttgtgacagatggggctaagtcacaaacttgcagcctaaggcagaatctgaagaactttccagagtgtgcccatatttacctgatcagagagaaaagaaaatctgcagaggaagctgagcctggctgcttgtcatagctgacacagagccatctgccacaaacctgtggcggcttcagatctccaatccctgccaccaccccaactcaaattaaatacagattcctagagacgttatgatggttacacatgtcctcggcatcacatgtaggagactgttcaaaaaaaatatgtggcctgttgtataaccgcactcatgtatcccatatgtggtgccacattgaatttccggttgaatccgtttttatcctttgtactggatgacatggtgcctgaattctttcttttcgccgacacgatggcagccaaactgcagcttcaaacgctcacacttggctgggtttctacctaggttgccaggttatcatcggagccttcttgtgtcctcaaagggccacgaggcctgaaaggaggatcagaatgctttgggattaattgggcagccatcgcagaattgtttgtgggcaaagggctgctttagcacttttcttttagcaaattaatgactctcaggcacagggggttttaagtgaaggtattaataagaggtctggcaggtattcccatgattcacagagttacatttgcatttaattaatcttaaagttgcaagataaacagctgtaattcggacaaacatgacaaacacagtgaagccaactatcccataaaatgaacactgacatacttgttttaatttttttcccagcgtaaaaatagaaaaatcaaaatactcctaacaaaaccagtgattttgatagaaatatttctccaatatacttgcatccacctacaaatataaccttttcaagataaatcgcttatgatttcaatagtcaaactgctgtgtttgttgatgtaaagatgttttgaatggctagatggtaaaataaattcttaataaagtacccactgcaatttttaaaaaaaaaaaaaaa

SEQ ID NO: 667 - DNA, 200 bp, Homo sapiens
actactgctactgctacaaatactactagtgttgctgctgctgctattactattatcactgttactactatccttgccactatttctattactactactgctgttactactactattactgctactgctacacctgctactgctatccccactattcctactaccattgctcctactgccactactgtcttcgctataat

SEQ ID NO: 668 - DNA, 5215 bp, Homo sapiens
cgagcgcggcgcccttgagctgcaccgcggcgcaggtttgcgagccgacttgtcagccggccaagaaaaggaagctccgtcccttcccgctcacccggcttccccaccccttgtactctaaactctgcagagggcgagcggcgcggccacggaggcgccgaggaggagcgagccgccgccgggcagcggcgtgccctcgggggagagggcgccggagaggaggcggcggcgcggcggcgagggcgcggcgcgcgatggcagctgcttagcccggcgggcgcggagcagccccgagctgtggctggccaggcggtgcggctgggcgggggacgccgccgccgttgctgcccggcccggagagatgagcacggaggcggacgagggcatcactttctctgtgccacccttcgccccctcgggcttctgcaccatccccgagggcggcatctgcaggaggggaggagcggcggcggtgggcgagggcgaggagcaccagctgccaccgccgccgccgggcagcttctggaacgtggagagcgccgctgcccctggcatcggttgtccggcggccacctcctcgagcagtgccacccgaggccggggcagctctgttggcgggggcagccgacggaccacggtggcatatgtgatcaacgaagcgagccaagggcaactggtggtggccgagagcgaggccctgcagagcttgcgggaggcgtgcgagacagtgggcgccaccctggaaaccctgcattttgggaaactcgactttggagaaaccaccgtgctggaccgcttttacaatgcagatattgcggtggtggagatgagcgatgccttccggcagccgtccttgttttaccaccttggggtgagagaaagtttcagcatggccaacaacatcatcctctactgtgatactaactcggactctctgcagtcactgaaggaaataatttgccagaagaatactatgtgcactgggaactacacctttgttccttacatgataactccacataacaaagtctactgctgtgacagcagcttcatgaaggggttgacagagctcatgcaaccgaacttcgagctgcttcttggacccatctgcttacctcttgtggatcgttttattcaacttttgaaggtggcacaagcaagttctagccagtacttccgggaatctatactcaatgacatcaggaaagctcgtaatttatacactggtaaagaattggcagctgagttggcaagaattcggcagcgagtagataatatcgaagtcttgacagcagatattgtcataaatctgttactttcctacagagatatccaggactatgattctattgtgaagctggtagagactttagaaaaactgccaacctttgatttggcctcccatcaccatgtgaagtttcattatgcatttgcactgaataggagaaatctccctggtgacagagcaaaagctcttgatattatgattcccatggtgcaaagcgaaggacaagttgcttcagatatgtattgcctagttggtcgaatctacaaagatatgtttttggactctaatttcacggacactgaaagcagagaccatggagcttcttggttcaaaaaggcatttgaatctgagccaacactacagtcaggaattaattatgcggtcctcctcctggcagctggacaccagtttgaatcttcctttgagctccggaaagttggggtgaagctaagtagtcttcttggtaaaaagggaaacttggaaaaactccagagctactgggaagttggattttttctgggggccagcgtcctagccaatgaccacatgagagtcattcaagcatctgaaaagctttttaaactgaagacaccagcatggtacctcaagtctattgtagagacaattttaatatataagcattttgtgaaactgaccacagaacagcctgtggccaagcaagaacttgtggacttttggatggatttcctggtcgaggccacaaagacagatgttactgtggttaggtttccagtattaatattagaaccaaccaaaatctatcaaccttcttatttgtctatcaacaatgaagttgaggaaaagacaatctctatttggcacgtgcttcctgatgacaagaaaggtatacatgagtggaattttagtgcctcttctgtcaggggagtgagtatttctaaatttgaagaaagatgctgctttctttatgtgcttcacaattctgatgatttccaaatctatttctgtacagaacttcattgtaaaaagttttttgagatggtgaacaccattaccgaagagaaggggagaagcacagaggaaggagactgtgaaagtgacttgctggagtatgactatgaatatgatgaaaatggtgacagagtcgttttaggaaaaggcacttatgggatagtctacgcaggtcgggacttgagcaaccaagtcagaattgctattaaggaaatcccagagagagacagcagatactctcagcccctgcatgaagaaatagcattgcataaacacctgaagcacaaaaatattgtccagtatctgggctctttcagtgagaatggtttcattaaaatcttcatggagcaggtccctggaggaagtctttctgctctccttcgttccaaatggggtccattaaaagacaatgagcaaacaattggcttttatacaaagcaaatactggaaggattaaaatatctccatgacaatcagatagttcaccgggacataaagggtgacaatgtgttgattaatacctacagtggtgttctcaagatctctgacttcggaacatcaaagaggcttgctggcataaacccctgtactgaaacttttactggtaccctccagtatatggcaccagaaataatagataaaggaccaagaggctacggaaaagcagcagacatctggtctctgggctgtacaatcattgaaatggccacaggaaaacccccattttatgaactgggagaaccacaagcagctatgttcaaggtgggaatgtttaaagtccaccctgagatcccagagtccatgtctgcagaggccaaggcattcatactgaaatgttttgaaccagatcctgacaagagagcctgtgctaacgacttgcttgttgatgagtttttaaaagtttcaagcaaaaagaaaaagacacaacctaagctttcagctctttcagctggatcaaatgaatatctcaggagtatatccttgccggtacctgtgctggtggaggacaccagcagcagcagtgagtacggctcagtttcacccgacacggagttgaaagtggaccccttctctttcaaaacaagagccaagtcctgcggagaaagagatgtcaagggaattcggacactctttttgggcattccagatgagaattttgaagatcacagtgctcctccttcccctgaagaaaaagattctggattcttcatgctgaggaaggacagtgagaggcgagctacccttcacaggatcctgacggaagaccaagacaaaattgtgagaaacctaatggaatctttagctcagggggctgaagaaccgaaactaaaatgggaacacatcacaaccctcattgcaagcctcagagaatttgtgagatccactgaccgaaaaatcatagccaccacactgtcaaagctgaaactggagctggacttcgacagccatggcattagccaagtccaggtggtactctttggttttcaagatgctgtcaataaagttcttcggaatcataacatcaagccgcactggatgtttgccttagacagtatcattcggaaggcggtacagacagccattaccatcctggttccagaactaaggccacatttcagccttgcatctgagagtgatactgctgatcaagaagacttggatgtagaagatgaccatgaggaacagccttcaaatcaaactgtccgaagacctcaggctgtcattgaagatgctgtggctacctcaggcgtgagcacgctcagttctactgtgtctcatgattcccagagtgctcaccggtcactgaatgtacagcttggaaggatgaaaatagaaaccaatagattactggaagaattggttcggaaagagaaagaattacaagcactccttcatcgagctattgaagaaaaagaccaagaaattaaacacctgaagcttaagtcccaacccatagaaattcctgaattgcctgtatttcatctaaattcttctggcacaaatactgaagattctgaacttaccgactggctgagagtgaatggagctgatgaagacactataagccggtttttggctgaagattatacactattggatgttctctactatgttacacgtgatgacttaaaatgcttgagactaaggggagggatgctgtgcacactgtggaaggctatcattgactttcgaaacaaacagacttgactgttgctcaatctaatcttcgatggaaattctaaaaattaatacagagctgatcttcttgggggtgggaaaatcgaagggagaggagaaaggcgctgcactttaaatccagtatttgtttactcatgttaaaaaaaaaaaaaacagacaaaacacactgaaatttcctaactacatctatttctataatttttaaggactcttcataaggactcttaaaataatcctgaacattagaaccctaatgttcaggaagattttaatctaagcatttttatggaaatatttttaatgcagcagctattgcacttcagccaaatgtttatttcacacaaaacggatgtaacatttcatgtgatcgtgcaccactggaacaaaaccaaaatgtgaccataactgtttaggcttctgtgtgtttgtaatatgctctaataatctgagtagaaatgcgtaatttcaattactgtataaagtttatgtttttttaagtgtgcagaatctgagagcaatggtttttacttctctgtgttaattgtaatattgactctattttgtaacttaagtttctgacctgtcgtacatttgtttgagtcgtttatgtactactgaactgtaccagttgcacatgcttgaactgtagtaatgttagcttgttctaaagctatccattgtgtcatatttactctaaaaattaaagagactctcaacaaaaaaaaaaaaaaaaaaaaa

SEQ ID NO: 669 - DNA, 4200 bp, Homo sapiens
gactctcgcctgacttcctaatttgctacttatccccagcgttggtcccggcgaggatatgctgagatttatggcactgttggctgcatttttggagaacagcaagcagcttcttttcagataatcccaccgtttctggcatgtcagatatggattatcctttacaaggacctggtttgctgtccgtacccaaccttccagagatcagttccatccgaagagttcctctcccacctgaacttgttgagcagtttggacatatgcagtgtaattgcatgatgggtgtgttccctcctatcagcagagcttggctcacaattgacagtgatatattcatgtggaactatgaggatggaggagaccttgcctattttgatggacttagtgagactattcttgctgtggggcttgtgaagccaaaagcaggcatctttcaacctcatgtgcgacacctcctggttttggcgacccctgtagacatagtaattcttggactcagctatgctaatttgcaaacaggttctggagttcttaatgatagtttgtctggtggaatgcagttgcttccagatcctttatattctcttcctactgataatacttaccttttaacaataacttccactgataatggcagaattttcttggctggaaaggatggctgtttatatgaagtagcctaccaggctgaagcagggtggtttagccaaagatgtaggaaaataaaccactcaaagagctcactttctttccttgttccttccttgctacaattcacgttctcagaagatgatcctattcttcaaattgcaattgataattctagaaatattttatatacacgatctgagaaaggagtaatacaggtgtatgatttgggacaagatggacaaggaatgagcagagttgcctctgtgtcacagaatgccattgtctctgctgctggtaacattgctaggaccatcgatcgttctgtttttaaaccaattgtccaaatagcagtgattgaaaattctgaatcactggactgtcagttattggctgtcacacatgcaggtgttaggttatattttagcacttgtccattcagacagccattagcacggcctaatacactgacgctggttcatgtccgcttacctcctggattctcagcatcttcaaccgtggaaaagccttcaaaagtacatagagctctttatagtaaaggtattctattgatggcagcctcagaaaatgaggataatgatattttatggtgtgtcaaccatgatacttttcctttccaaaagccaatgatggaaacccagatgacagctggtgttgatggtcattcctgggctctttctgcgatagatgaattgaaagtagataaaataattacacctttaaacaaggatcatattccaataactgattcaccagttgttgtacagcagcacatgttacctccgaagaaatttgttctcctctcagcacaggggagccttatgtttcataaacttagacctgtagatcaactgaggcatctacttgtgagtaatgtgggaggagatggagaagagattgaaagattctttaaattacatcaggaagaccaggcttgtgcaacttgccttattcttgcttgctccactgctgcctgtgatagagaagtatctgcctgggctactcgggctttctttaggtatggtggtgaagcacagatgagatttccaaccactcttccgcctccaagtaatgttggtcccatcttggggtctcctgtctattctagttctcctgttcctagtggtagtccctatccaaatccatcctttttgggaacaccgtctcatggtatacagcctcctgccatgtcaactccagtgtgtgctctgggaaacccagcaactcaggccacaaatatgagttgtgtgactggaccagagattgtgtactctggaaaacacaatggtatttgcatttacttttctcggatcatgggaaacatttgggatgcaagcttagttgtggagagaatattcaagagtggcaacagagagatcactgcaattgaaagtagtgttccctgccaactgctagagtcagtgctacaagaactaaagggtttgcaggaatttctagacagaaactcccagtttgcaggaggaccattaggaaatccaaatactactgctaaagtgcagcagaggctgataggattcatgcgtcctgaaaacggaaatccccagcaaatgcaacaggaactgcagaggaagtttcatgaggctcaactaagtgaaaagatttcacttcaggcaattcagcagttggttcgaaaatcatatcaggctctggctttatggaaacttctttgtgaacatcaattcactatcattgtggcagaacttcagaaggaacttcaagagcagctgaagatcaccacctttaaagatcttgtaatcagggacaaagaactcacaggggcattaattgcttctcttatcaactgctacatcagagataatgccgctgttgatggcattagtttacatttacaggatatctgcccacttctatatagcactgatgatgcaatttgttctaaggcaaatgagcttctccagcgttcccgacaagttcaaaataagactgaaaaagaaagaatgttaagggaatcattaaaggaatatcaaaaaattagcaatcaagtggacctttccaatgtttgtgctcagtatagacaagtgagattttatgagggtgtggtggaactttctcttacggctgcagagaaaaaagatcctcaaggtcttgggcttcatttctataaacatggagaaccagaagaagacatagttggacttcaggccttccaagaaagattaaacagttacaaatgcattacagacacacttcaagaactggtaaatcaaagtaaggccgctcctcagtctcccagtgtacccaaaaaacctggtcctccagtgttgtcatctgatccaaatatgctgagtaatgaagaagcaggacatcattttgaacaaatgcttaaattgtcacagcgatccaaggatgagctctttagtattgccctttataattggctaatacaagtcgaccttgcagataagctgctacaggttgcttctccatttctggagccacatctagtccgaatggccaaagttgatcaaaacagagttcgttatatggatttactctggcggtattacgagaagaacagaagtttcagtaatgctgctcgtgtactgtccagactggctgacatgcatagcacagaaatttcacttcagcagcgactagagtacattgctcgagccattcttagtgccaaaagttccactgccatttcatcaatagctgccgatggtgaatttcttcatgaattagaagaaaaaatggaggttgctaggatccaacttcagatacaggagacactacaaaggcagtattcccatcattcttctgtacaggatgcagtttctcagctggattctgagctgatggacataactaagctttatggggaatttgctgacccatttaaacttgcagagtgcaaacttgcaataattcattgtgccggttattcagaccctatattggtgcagacactttggcaagatatcatagagaaagaattgagtgacagtgtgacattgagctcctcggatagaatgcatgctcttagtctcaagattgttctccttggcaaaatttatgctggcacaccacgcttctttcctttagattttattgtacagtttttagaacagcaggtttgtactttgaactgggatgtgggcttcgtaatacagacaatgaatgaaattggagtaccattacctagactactagaagtttatgatcagttgttcaaatcacgggatccattctggaacagaatgaagaagccactgcaccttttggattgtatacatgtattattgataagatatgttgagaatcccagccaagttttaaattgtgaaaggagaagatttacaaatctctgcctggatgctgtttgtggttaccttgttgagctccagtctatgagctcgtcagtagcagtacaagccatcactgggaattttaaatctcttcaagctaaattagaacggcttcattaattactgtgatatactttcatccgttttatgatctgtaaaataaaaactcagctgggtccag

SEQ ID NO: 670 - DNA, 4130 bp, Homo sapiens
gaagctcggtgccggctcgcgcgatcggtgggacagaatttcgttgttttcaccgacgagactggaggaaacaacaccaaatagggataccatgggacaaacagtgaatgaagattccatggatgtcaagaaggagaatcaagagaaaactcctcagtcaagtacatcttctgtacaaagggatgatttccactgggaggagtatttgaaagagactgggtctataagtgctccttcagagtgcttccgtcagtctcagattccacctgtgaatgatttcaaagttggtatgaaattggaagcccgtgaccctcgcaatgccacttcagtatgtattgctacggttattggaattactggggccaggttacggttacgactggatggtagtgacaacagaaatgatttttggaggcttgtcgattccccagacatacaacctgttgggacatgtgaaaaggaaggagacttacttcaacctccactagggtaccagatgaatacatcctcctggccgatgttcctcttaaagacactaaatgggtctgaaatggcatctgccacattatttaagaaggaaccaccaaagcccccactaaataattttaaagtggggatgaaactggaagctattgacaaaaagaacccgtatctcatctgtcctgcgaccattggagatgttaaaggggatgaagttcatatcacatttgatggctggagtggagcttttgattactggtgcaagtatgattctcgagatattttcccagctgggtggtgtcgcctgacaggagatgtattacaacccccaggaactagtgttcctattgtaaagaatatagcaaaaacagagtcttctccttccgaagcaagccagcattcaatgcagtctccacagaaaactactctaatattaccaacacagcaggtcaggagatcaagtcgaattaaaccacctggacctactgcagtccccaaaaggagcagttctgttaaaaatatcacaccaaggaaaaaaggtccaaactcaggaaaaaaggaaaaacctttgcccgtgatatgttctacatctgcagcttctctaaaatcgctgaccagagaccgtggcatgttatataaagatgtcgcttctgggccatgtaaaatagtgatgtctacagtctgtgtctatgtaaacaaacatggaaactttggccctcatctggatcccaagagaatccagcagctgcctgaccacttcggcccgggcccggtgaatgtggtgcttcgccggattgtgcaggcctgtgtggattgtgcccttgaaactaaaactgtttttggatacctgaagccagataatcgtggaggagaagtgataactgcctcctttgatggggaaactcattccatccagctccctccagtgaacagtgcatcatttgctcttcgctttcttgagaacttctgccacagtctgcagtgtgataaccttttgagtagccagccttttagttcttccaggggtcatactcacagctctgcagagcatgataaaaatcagtcagcaaaagaagatgtaacagaaaggcaaagcaccaaacgatctcctcagcaaactgtaccatatgttgttcctctctctcctaagctccccaaaacaaaggagtatgcgtctgaaggagaaccattgtttgctgggggaagtgccattcccaaagaggagaatctttcagaagattctaagagctcatcactaaattcaggaaattatttgaatcctgcctgtagaaatcctatgtatattcatacttcagtctcccaggatttttctcgaagtgtgccaggcaccacaagttcaccactagttggggacatatcccccaagagcagtccccatgaagttaaattccaaatgcagaggaaaagtgaagctccaagttatatagctgtacctgatcccagtgtcctgaaacaaggcttctctaaggacccttcaacctggtctgtggatgaagtgatacagtttatgaaacatacagatcctcagatatcaggccccctcgccgacctcttcaggcaacatgaaattgatgggaaggctctgttcctactcaagagtgatgtgatgatgaagtatatggggctgaagctggggccagcattaaagctgtgttactacattgaaaagcttaaagaaggaaaatacagttaaaaaatgtgtaagtttagattggacataattctcaggtgtactgttaacattttaatttaaaagtatttctcttagcagtttttgttttgtagacagttcccataaaaatattttatcagaattgcagaactgtagtaacagttcagtcaactttgtttttttcctggagtcaccaaccagctttgggagacacagccgccactcccccagtctacttctttaaaaagcatttaacaggttagtattggcatattcaaattggcagttctttatgtctttttaaattttcattgtacagtttacaaatatacttaatgtagttaacagagaaaaacctttgattttggttaacctttatatctagaaccaaaacagctaaatcccaaaggggaaaatatcagggattgacaacttctataattaaatccatgagaatttttcctcactagagaatttaaaggtgcacctgtagatatcatcttttctcagatattttgtgtgatactctgtggtgttctgttcatgttctatcagtatatctagaaagggaatagccatataaattattttccttttattatttctctgtatgttgtatttgatcatatttaaaggaaaaaagcaagcttataagctttcatgaagtgttcttaccagtttttgataaattttttaaattataggatagaattgtcattttatgcaggagatatttatactacgagggttgtttggatggagtcagattaaattttttcagtgaaattcctattattttaaaactttccatattttcactacgcttggacatttaactaggcattcttttcttacatctctatatgaagatacctgtgtccaaaatttttgaagatatatattgtatgtgtttattcttcatatggtactttaccatatttatatattgttttatacctgtaggtttacacacaagtaaatctttttttcttgaatttaatctgggcactttgcactgccacaggggtgacgatggaactatgtatatagttaggatgttttgatttcggtaaaaaatatatgtcccatcgttgctatcaccagtacctctcagcttactcttcaggggatatgaaacaatctgtagattgggtttccataacagggaagtccgtcctaatgccaagtttctaattaatttgcttagttctgagccatttattctgctacactttgaaagatatattagttctgacttattgttggggctttattttatttttatttttttgagatggagtttcactcttgtgcccaggctggagtgcaatagctcgatctcggctcactgcaacctcgcctccctggttcaagcaattctcctgcctcagcgattacaggaatgcaccaccacgcccagctaattttgtagagatggggtttctccatgttggtcaggctggtctcaaactcctgacctcaggtgatccgcccacctcggccttgcaaaatgctgggattacaggcatgagccacctgcccagccatgtttggggctttattttataagttagaactttgaagaggaaatggtgctatatgtttattgttattactttgtgtaactttgatgtaatgtttataagctatgagaatcagttataaaagtattagccatttgttgtaaatgccaataaaatattcaccaggggcaagaatgtacattttctttttagaaaaccaaatgtactttagacatgaatgcaactatttaaagaatagcttcatttatgttattccttacatgtcataagattcttacttaaacttggtcttctttcaagttgtttgtatgaagatgctgtacccacttgaacagtcctcaggtgtttacataaatactatgttttacagttttcatattttaaaatattaataaagttaatcgcaacgattc

SEQ ID NO: 671 - DNA, 1858 bp, Homo sapiens
ctctgcctgggtgtctccctctctcagtgtgtgtgtctctctgtctgttttcacactctcctccccaatcgagcgaggcccacacctggcgcatcactgccgagccattagctgcgggtttcctttcatcttcgctgtggcagacgtttctatttatccacttgcgctcgccgagtggcgtcaccagcggtactgtaatgacgattgcagcaggaggatgacagcttagaaagaagagggcaatggggcttcctcccagaggcggtgcggcacagaggagcgctcgcttcacaaggtgaccctagctcccaccgccaccgccgcggtcgcggtccagaccgcgctccagcagctccgcgccctcccaggcacccggcctttctttctccctcttgcaaccaagatccgtccggccgctggagacccagggagccggggttaggaactcacttggggctttcccctcccccaccggagagccccgggatggagagccgaaaggacatggttgtgtttctggatgggggtcagcttggcactctggttggcaagagagtctcaaatttgtccgaagccgtgggcagcccgctgccggagccgcccgagaaaatggtgccccgtggttgcctgagccctcgggccgtccctccggccacccgggagcgcggcgggggaggcccggaggaggagccggtagatggactcgcaggcagcgcggcggggccgggcgccgagccccaggtagctggggcggccatgctcggcccaggacccccggccccctcagtcgacagcctctccggacaggggcaacccagtagctcggacaccgagtcggatttctatgaagaaatcgaggtgagctgcaccccggactgcgccaccgggaacgccgagtaccagcacagcaaagggtccggctccgaggcgctggtcggcagtccgaacggagggagcgagacccccaagagcaacggcggcagtggtgggggcggctcgcaaggcaccctggcgtgcagcgccagtgaccagatgcgtcgttaccgcaccgccttcacccgagagcagattgcgcggctggagaaggaattctaccgggagaactacgtatccaggccgcggagatgtgagctggcggccgccctaaacctgccggaaaccaccatcaaggtgtggttccagaaccggcgcatgaaggacaagcggcagcgcctggccatgacgtggccgcacccggcggaccccgccttctacacttacatgatgagccatgcggcggccgcgggcggcctgccctaccccttcccatcgcacctgcccctgccctactactcgccggtgggcctgggcgccgcatccgccgcctccgccgccgcctcgcccttcagcggctcgctgcgcccgctcgacacgttccgcgtgctgtcgcagccctacccgcggcccgaactgctgtgcgccttccgccacccgccgctctaccccgggcccgcgcacggactgggcgcctctgccggcggcccctgctcctgcctcgcctgtcacagcggcccggccaacgggctggcgccccgggctgccgccgcctcggacttcacctgtgcctccacctcccgctcggactccttcctcaccttcgcgccctcggtgctcagcaaggcctcctccgtcgcgctggaccagagggaggaggtgcccctcactagataaggggccgccggctggctgccggctccatgacgcccgtggggtcaccccccggccccgggactcagccagcctcgctcctcgctcctcgctcctcgcccctaggacgccaagggggaaaggagagggcggaaaaggaccagcgggatcc

SEQ ID NO: 672 - DNA, 1619 bp, Homo sapiens
aggaaagctaagacaaacaaaactacaatggaagaagaaaacgtcctcaactagacatctgccaaaaatatcatccagaatgccctggcaagttcacttccatttagtgaagtgagataatttggcaattcacgcaagagactgagaaccaagcctcaagccctgcctctgattctgcaggtatggaacatgagcagctgacctactcttccacaaggtccaaagcccccagtgtcatcatcacaggtcttaagccagccaccaaatatgtatttcacatccgagtgagaactgcgacaggatacagtggctacagtcagaaatttgaatttgaaacaggagatgaaagactctccatttcaagtgacaaaactgtactggcttaatgaaaagtgggactttattgcctcagcttctgacatggcagcagaacaaggacagattctcgtgatagccaccgccgctgttggcggattcactctcctcgtcatcctcactttattcttcttgatcactgggagatgtcagtggtacataaaagccaagatgaagtcagaagagaagagaagaaaccacttacagaatgggcatttgcgcttcccgggaattaaaacttacattgatccagatacatatgaagacccatccctagcagtccatgaatttgcaaaggagattgatccctcaagaattcgtattgagagagtcattggggcaggtgaatttggagaagtctgtagtgggcgtttgaagacaccagggaaaagagagatcccagttgccattaaaactttgaaaggtggccacatggatcggcaaagaagagattttctaagagaagctagtatcatgggccagtttgaccatccaaacatcattcgcctagaaggggttgtcaccaaaagatccttcccggccattggggtggaggcgttttgccccagcttcctgagggcagggtttttaaatagcatccaggccccgcatccagtgccagggggaggatctttgccccccaggattcctgctggcagaccagtaatgattgtggtggaatatatggagaatggatccctagactcctttttgcggaagcatgatggccacttcacagtcatccagttggtcggaatgctccgaggcattgcatcaggcatgaagtatctttctgatatgggttatgttcatcgagacctagcggctcggaatatactggtcaatagcaacttagtatgcaaagtttctgattttggtctctccagagtgctggaagatgatccagaagctgcttatacaacaactgacctcttccaaactctaacacttaacctctgctattctgcataaattctgagaaaagccaaattttctgtcggtctaagaagacatagcctacacccaactggagataattataaaaaataatgaagcagcatgaggggaaggtatttaatgtgtattttaaagttgggagagattctccttcacctaatttaggtgtttgtgaattggcttgactttttgaagttaatttttaagccttgaacatgtccaactttaagaactttaagaataaatattttaacacaagtgaaaaaaaaaaaaaaaaaaaaaaaagg

SEQ ID NO: 673 - DNA, 2326 bp, Homo sapiens
caaccctgaatgtcatagttagctactttcaactggaagctacaacatggatttatggaatctgtcttggtttctgttcttggatgctcttctcgtgatttctggcttggcaactccagaaaactttgatgtagatggcggaatggaccaggacatatttgatatcaatgaaggtttgggactggatctttttgagggtgacatcagacttgatagggcacaaattagaaattccatcattggagaaaagtatagatggcctcataccattccatatgttctagaagatagcttggaaatgaatgctaagggagttatcctcaatgcatttgaacgttatcgccttaaaacatgtattgactttaagccttgggctggagaaacaaactatatatcagtgttcaagggcagtggctgctggtcttcagtaggaaataggcgggttgggaagcaagaactttccatcggggcaaactgtgaccgaatagcaacagttcaacacgagttcctccacgctctgggattctggcatgagcagtcgcgttctgaccgggatgactatgtcaggataatgtgggacagaattctgtcaggcagagagcacaattttaacacctatagtgacgatatatcagattccctgaatgttccctatgattacacttcagtaatgcactacagtaaaactgcattccaaaatggaacagagccgacaattgtcacaagaatctcagactttgaggatgtgatcggccaacgaatggatttcagtgactctgatctcctaaagttgaatcaactgtataactgctcctcttccttgagttttatggactcatgcagttttgaactggaaaatgtgtgtggcatgatccaaagttcaggagataatgctgactggcaacgggtttcacaggttcccagggggccagagagtgatcactccaacatgggccagtgccaaggttctggtttcttcatgcatttcgatagcagctctgtaaatgtgggggccacagcagtgctggaaagtagaacgctgtaccctaaaagaggatttcagtgcctgcaattttacttatataacagtggcagtgaaagtgatcaactgaacatctatatcagggagtattctgcagacaatgtggatggcaatttaacccttgtggaagaaataaaagaaatacccactgggagctggcaactttatcatgtaacattgaaagtgaccaagaagtttagagtggtgtttgaaggacgcaaaggctctggtgcatcactgggtggtctgtctattgatgacatcaatctttcggaaacacggtgccctcatcatatctggcatataaggaatttcacacagttcattggcagcccaaatggaactctgtatagccctccattttactcttctaaaggttatgcctttcagatttacttaaatctagcccatgtgactaatgcagggatatatttccacttgatctctggagccaatgatgatcaattacagtggccatgtccttggcaacaagccacaatgacacttttggatcaaaatcctgacattcgacagcgtatgtccaatcagcggagtataactacagacccatttatgaccaccgataatggaaactatttctgggacaggccttctaaagtgggaacagtggctttgttctctaatggaactcagtttagaagaggtgggggctatggaaccagtgcctttataacccacgaaaggctgaaaagcagagattttataaaaggagatgatgtttatatcctactgacagtggaagacatatctcacctcaactctacacaaatccagctaacaccagcccctagtgttcaagacctctgctcaaaaaccacctgtaaaaatgacggtgtctgcactgttcgagatggcaaagctgagtgcaggtgccagtcaggggaagactggtggtacatgggagaaaggtgtgaaaagagaggctccacccgagacaccatagtcattgctgtttcatctactgttgctgtgtttgccttgatgctgatcatcacccttgtcagtgtctattgcaccaggaagaaatatcgtgaaaggatgagctcaaatcgaccaaatttgactctgcaaaatcatgctttttgaagattaactcgacaatatggccagctaatgaaattaaaaaggattcttcatcatggatttcgcctaagtgatattacagccacctcattcttctaaaagtggatatttttctgtaaatagctggaaatattataaatcactattttggtcaaagtcaaaaaaaaaaaaaaaaaaaaa

SEQ ID NO: 674 - DNA, 683 bp, Homo sapiens
ttcggcacgagctaactatctcacaatataggtccccaaccactgaccaaactccagtccaggcagccaccagctggcctggtcttgctgcttcctttagcggcttccaaggtccagggacagggggtctgggccaccaagaggctctgctaggctgtccctgcagccacagccaccccactggacccctgcctcccatctgagaggacagccctcttcctggagctgggatctgacacttgctgataccaacggcagataccaggtcaaggattcggtgacttgaagacaggcctcctctgttgctttgagtcaatttctagtacctgggcctaaatcttgactgcacaccggtcatattattgaggtaacgagatgtgagcagaaacaacctgtgtcacacctgggcagaagctttaaaggccagtgctgcccttgttggggaagcaagtatagatatgaatcgttccacaacgcggagcgccccctgccgacccatgctgggcgtgtactataggtataagaatagtctttggagcatcatctgagatagtgagccaagatcgtgcaactgcactccagcctgagtaacagagtgagactccatctcaaaacaaacaaataaacaaaacagaataaatatactcaggatatttacaaaaaaaaaaaaaaaaaaaaaaaaa

SEQ ID NO: 675 - DNA, 415 bp, Homo sapiens
ataccaacctgacactgctgttctctttcgcccaggctcgtgcctgcgccgaagccggcgtcttcttgatctctccgttcgtcggccgcatctatgactggtatcaggccaaacagcctgccgctgactatgatgccgaccaagatccgggtgtgaaatcagtacgcaacatttacgaatactacaaacagcaccgttatcagacggtgatcatgggagccagcttccgcaaggtagagcagatcctggcattggccggttgcgatcgtctgaccattgcaccgaatctgctggaacaacttaagcacagcgaccagccggtcgaacgtaagctgacgccatccactgaagccttccaccaacctgccccgctggctgaagccgaattccgctggcagcataaccaagacgcgat

SEQ ID NO: 676 - DNA, 1864 bp, Homo sapiens
tttaggtttaggttggggtgccggaattaggaaggtttgtgcccccttctacacaacactgaactccttttttttttttttcagggctgggtcagttagaacctaaacaaactagagacctggttgcaacccctcaggctctgctgatgctgtccccctttgttcctgcagcgtggaccctgccagcagccaggccatggagctctctgatgtcaccctcattgagggtgtgggtaatgaggtgatggtggtggcaggtgtggtggtgctgattctagccttggtcctagcttggctctctacctacgtagcagacagcggtagcaaccagctcctgggcgctattgtgtcagcaggcgacacatccgtcctccacctggggcatgtggaccacctggtggcaggccaaggcaaccccgagccaactgaactcccccatccatcagaggacaagcaggtgcaggcagcagcagtccagaggcccccctgagatctgaggatagcacctgcctccctcccagccctggcctcatcactgtgcggctcaaattcctcaatgataccgaggagctggctgtggctaggccagaggataccgtgggtgccctgaagagcaaatacttccctggacaagaaagccagatgaaactgatctaccagggccgcctgctacaagacccagcccgcacactgcgttctctgaacattaccgacaactgtgtgattcactgccaccgctcacccccagggtcagctgttccaggcccctcagcctccttggccccctcggccactgagccacccagccttggtgtcaatgtgggcagcctcatggtgcctgtctttgtggtgctgttgggtgtggtctggtacttccgaatcaattaccgccaattcttcacagcacctgccactgtctccctggtgggagtcaccgtcttcttcagcttcctagtatttgggatgtatggacgataaggacataggaagaaaatgaaaggcatggtctttctcctttacggcctccccacttttcctggccagagctgggcccaagggccggggagggaggggtggaaaggatgtgatggaaatctcctccataggacacaggaggcaagtatgcggcctccccttctcatccacaggagtacagatgtccctcccgtgcgagcacaactcaggtagaaatgaggatgtcatcttccttcacttttagggtcctctgaaggagttcaaagctgctggccaagctcagtggggagcctgggctctgagattccctcccacctgtggttctgactcttcccagtgtcctgcatgtctgcccccagcacccagggctgcctgcaagggcagctcagcatggccccagcacaactccgtagggagcctggagtatccttccatttctcagccaaatactcatcttttgagactgaaatcacactggcgggaatgaagattgtgccagccttctcttatgggcacctagccgccttcaccttcttcctctaccccttagcaggaatagggtgtcctcccttctttcaaagcactttgcttgcattttattttatttttttaagagtccttcatagagctcagtcaggaaggggatggggcaccaagccaagcccccagcattgggagcggccaggccacagctgctgctcccgtagtcctcaggctgtaagcaagagacagcactggcccttggccagcgtcctaccctgcccaactccaaggactgggtatggattgctgggccctaggctcttgcttctggggctattggagggtcagtgtctgtgactgaataaagttccattttgtggtaaaaaaaaaaaaaaaaaaaaaaaaa

SEQ ID NO: 677 - DNA, 501 bp, Homo sapiens
gttttgtactttctacttgcatatgctggttttataataataaaaggttattttaaaaagaaaatcactattttccgctgagcccagatacagcttctgaatcaccatcaacatgagactggtacattccagcatgggaggctgccagggcatcagtccagctggttacttcttcgaagaagtaactactgatttccttttgcctattgatttccattgcctatgcatcttacctgtggctcaagattaccttggcactaaatccaattagccttttcactttggcagcccttaccaattggcaacttctttgtctcttggtttgcttttgggcaaaaattaccttcttctttagtttttgagtcattatatcctcttggttttcttcctacctttctgacttctcagtctcctttgaaagtttacagcttctttaatttcccccacaattccatactcagccttctctcttcactctatatctttttcccaaaaaaaaaa

SEQ ID NO: 678 - DNA, 3633 bp, Homo sapiens
gggggttttttattttgacctattagtatggttaaatttatggatttactatttattgaaccatttttgcatcttggaatgagccctaattgatctgttattattttaatgtcctgatggatttactttgccaatgcatatatttaggatttttatatcaatattcataagagatcagtctatagttgttgttttttaatgtgttttgtctagttttggtattcgcatctgattgctttgtaaaaacaattgagaagtttcatttctttttctgagtttcggaacagattaaatagccaagtattatttattcttcagttaccaaattcatatttactaaacactatgtgctaggaattggactggatgctgggtaatcagtagtaaacaaaacagatatggttcctgccgtgatattgcttggctcattaaggaaaatgacattaatgaagaaactacacatatgtaattataaatcatgcaagaaaaggacaggatgctttgagataatatcattgaagatctttagattgtgctttttatgcatttgagtaaatgactattgagtacatacatatacactaatagctaattatttaaattagtatgtattgatttggtgtgtaattagggctgtggtgggtgcattagtaaaatgaggtcttcataattacacaaaatataaaataatggcaatagtagctaccattgtaggaggtagctgcatcattttttaatggtagaaattaagacaggttaagtagacacttttagtctaacatgttcaattgtatacactctttggaagtctctcttaagattatagtaaaagaataaggatataaatccacaaagatcaagaggaggtgagaggaagatatagctgaaatcagtatttgggaaactagaaaggagatgggcaagtaataaatgatttcatgaattagagaatgctgaaagctgaagagaggtaacccagcaaggagcaagcagattctttccacagaatctggaaaagttttaggaattgggggtatcaagtacaggacttctgaagtcaagaattacaggatggggtgggaatagaagggttggttgatggtctttatcattttgataccctggaaccccttctccactcccacacacccagacaactactctctcctctaccttgacagaagactgaaggtttatacccaggagactaggaggctccagatggttaaggtgggggtgaagcacctaaatgaaaatgaggattgagtgaaagtcaggtcaacatgctgaacctagagcggttgtctttttttgattggcttccaaactatcaggcttacgtgcccctcaacaaaacattaacggattcttagctggggaaacttaccagcccatggcacagtatttaacagatatgaactatggaaattcacccgattgaacagttggatccatcagatcacctggagagtacagccgctggtcaggaagcattgttcacgtaccacagcttctagtcaacttttatttcattttttgagacagggcctcactttgtcacccagattgaagtgcagtagcgccatcataactcactatagcgttgaactcctgggctcaagccatcctcccacctcagcctcctgggtagccgggaatacaggcgtatgcccccacgtccagctgatatttttattttttgtagagatggggtctcactatgttgccaggctggtcttcaactcctgggcttgtgatcttcctgccttggcttcccaaagtactgggattacaggtgtgagccactggtgcctggccctagtcagcttttaaatgcctcacatttgagtataaatgtacagccaagggttgcctgccatagaatgaaagtctctaatgaaaaagagaccaagtagggaataaaaggagctgagtataaatagatttacttcagggaacagaagaaacttcaacaaataaaactagtatctttaaagagaagatattacatctgtgaaagatgaaaaagtttatataaaaaaaactgctgcgacagaagaaatttcttaaaaatttaatacaaggtttagataataaagctgaagaattctccccaaaaaaccagaagagcacaagaattagaaaataagagtgaaatgatgagaaaattagagggccaaccaaggaggttcttcatctaatacagtggaaggaaactatctgtgtcccagaactgaagaaggtgactttctagattgaaagggcctattaagcgccctgatcaataaaacagaaacaaacaaaaaataaacaaaacttcattgtaccgaatgtatagttccaaaaggaacaagaccagattgattttcttcctacttctgaaaagaagaatgggggcagagaacgaggtgctagctcttaaactgcattttaacaaattcagggaaaaaggaaaccttcttaactttaaattgtatgcaagtgctgttaggtatccccagtgggaagttccaacagttctgtgacaaagataaagttgcgcagaagaagcatatttcaggtatctccagcaacttattcatatccagaatcagccctatccaaagagagaagtctcgtatacctggctaagactgaggagccatatggtatcaaggaaggagaaagcagaatgagaaagtgcctgggtggggcatgggagaggcagagatcttagtgctaataaagtactcctagaaatgagtgcataaccttggaaagcaagggttgtgtctctaagaggcaagcagagctggcaataaaggccctcctgaaccagattacatttggagattagataaggaacaaggcaccatattataaaacagcagtcctctgatttaggaacagagggaaccctaaagaaacatgacaagtgccctacccctccctacaccctgaatcttctgataacagtccaggataattcatctcattcagacatgtataacaaaaatagtatgtacagcatccatacagtgactgtctggtagatggtattttttatgttttatgttggttttttgttcttttatattatttttattattgaagatataattcacatgccataaaattcaccattttaaagtgtacagttgactggcttttaatttattcccaaggttgtgcaatgatcaccactaccaattgcattattgaccctagtgctttacttttccttatgttcactccatgaccctatgcagttcctttcattaaagtgacagagatatttccctactccttgactttgtgtttggctatgtgacttgctaaggtaaaggtgataacatatcagtttcaagcctaagccttaagaggccttgggtatttttatttgttctctttctatctgtgccatttccatgagaaaaacatgtctctgctagctcattggttgagggaagatgagagataggagagtgagggccaccccagctgagttaagctgaattcaatgaacactgtagagatgtgagtgataaaaaaatgattgtggttgtaagccagtgaacttcaggatggtctgttaataaacattagttaaccgaacagttatatgattaaaaataaaaaaaaaaaaaaaaaaaa

SEQ ID NO: 679 - DNA, 5061 bp, Homo sapiens
gacagacatggcgcttcagctgtcttcagaataatgtcacccggcctcctctcctgtcttctgcagtcttaaaagacctagtccctaactgaggtctggcttttcctcagccctggatgaagtggagaagacctatttggagactgcttcctgtcaccataaaatcctgaacatttgtcttgaacatgaacactccaaaagaagaattccaggactggcccatagtcagaatagcagctcatttaccagacctcattgtctatggacatttctccccagagcgaccctttatggattattttgacggagtcctgatgtttgttgatatttcaggttttactgcaatgactgagaagttcagcagtgccatgtacatggacagaggggctgagcagttggtggagatcctcaactaccacataagtgcaatagtggagaaagtgttgatttttggaggagacatcctgaaatttgcaggtgatgcactgctagccctgtggagggtggagcgaaagcagctgaaaaacattatcacagtggtaattaaatgtagcctggagatccatggattgtttgagacccaggagtgggaagaaggcctagacatccgagtcaagataggactggctgctggccacatcagcatgttggtctttggagatgaaacacacagccactttctggtgattggtcaggcagtggacgatgtgcgccttgcccagaacatggctcagatgaatgatgttattctgtcaccaaactgctggcagctctgtgaccggagcatgattgaaattgagagtgttccagatcagagagcagttaaggttaacttcttaaaaccaccccccaattttaattttgatgaatttttcacaaagtgtacgaccttcatgcattattatccttctggtgagcacaaaaacctcctgaggcttgcatgcacgctgaagcctgatcctgaactggagatgtccctacaaaagtatgtgatggaaagcattttgaagcagattgataacaaacagcttcagggctatttatctgagcttcgcccagtgacgattgtgtttgtgaacctgatgtttgaagaccaagacaaagcagaagagataggcccagccatccaggatgcctatatgcacatcacttctgtcctgaagatcttccaaggccaaatcaataaagtcttcatgtttgacaagggctgctctttcctctgtgtctttggcttccctggggaaaaggtacctgacgagctcactcatgctctggaatgtgctatggatatatttgacttctgctctcaagtccacaaaatccaaactgtatccatcggtgttgccagtgggattgtcttctgtgggatcgttggacacactgtgagacacgagtacacagtcattggtcaaaaagtcaacttagctgccaggatgatgatgtactacccaggaattgtgacctgcgactctgtcacctacaatgggagcaacctaccagcgtacttttttaaagagcttccaaagaaagttatgaaaggtgttgcagattctggaccattgtatcagtattggggccgtactgagaaagtcatgtttggtatggcgtgcctcatctgcaacagaaaggaggattaccctttgctgggacgtaataaagagatcaactacttcatgtatactatgaagaaatttttgatatctaacagcagccaagtcttaatgtatgagggattaccaggatatggaaaaagccagatacttatgaaaattgagtacctggcccaaggtaagaatcacaggattattgccatttcattgaataagatcagcttccatcaaactttctataccatccagatgttcatggccaatgtcctaggcctagacacttgtaaacattataaagaacgacagaccaaccttcgaaataaagtcatgacactgttggatgaaaagttctactgtcttcttaatgacattttccatgttcagttccctatttctcgggagatttccaggatgagcaccttgaaaaagcaaaaacaattggaaatattgtttatgaagatcttgaagctgatagtgaaagaggaaaggattatttttatcattgatgaggcccagtttgtggattcgacctcctggagatttatggagaagcttatccggactcttcctatcttcatcattatgtccctgtgtcccttcgttaacattccctgtgcagctgccagggccgtaataaagaacaggaacaccacctacattgtcgttggtgcagtacagcctaacgacatctccaacaagatctgtcttgacctcaatgtgagctgcatctccaaagaactggactcgtacctgggggagggaagctgtgggattccattttactgtgaagaattgcttaaaaacctggaacatcatgaggtactcgttttccaacaaacggagtctgaggaaaagacaaataggacctggaataacctgttcaagtattccattaagctaacagagaagttaaacatggttactctccatagtgataaggaaagtgaagaagtctgtcacctcacaagtggtgtcagactgaaaaacctgtcacctccaacgtcattaaaagaaatctctctgatccagctggatagcatgagactttcccaccaaatgctggtgagatgtgctgccatcattggcctgaccttcaccactgagttgttgtttgagattctcccctgttggaatatgaagatgatgatcaagaccctggcaaccctagtggaatctaacattttttattgtttccggaatggcaaggagcttcaaaaggccctgaaacagaatgatccctcatttgaggtgcactatcgttccttgtctctgaagcccagtgaagggatggatcacggtgaagaggaacagcttcgtgaactggagaatgaggtgatcgagtgccacaggattcgattctgtaaccctatgatgcagaaaacagcctacgagctgtggctcaaggaccagagaaaagccatgcacttgaaatgtgcccgctttttagaagaagatgcccacagatgtgaccactgccgaggcagggacttcattccctatcatcacttcacagtgaatattcggctcaacgctttagacatggatgccattaaaaagatggctatgtctcatggatttaaaactgaagaaaagcttatcttgtccaactcagagattcctgagacatctgcattttttcctgaaaatcgcagtcctgaagaaataagagaaaagatcttgaatttctttgaccacgttttaacaaaaatgaagacatctgacgaagacattatccctctggaatcttgccagtgtgaagaaatcctagagattgtcatcttgcctctggcccaccattttctggctttgggagaaaatgacaaagccttatattacttcttagaaattgcatctgcttatctcatcttttgtgataactacatggcatacatgtatttgaatgaaggacagaagttgctaaaaactctcaagaaggacaaatcttggagccagacatttgagtctgccaccttttacagcctcaaaggtgaggtctgtttcaatatgggccagatagtgcttgccaagaaaatgctgaggaaggcactgaagctcctcaaccgaatctttccttacaacttaatctccttgtttctccatatccatgtcgagaaaaacagacactttcattatgtgaatcggcaggcccaagagagcccacctccagggaagaagaggctggcacaactttaccggcaaactgtctgcctttccttgctgtggcgcatctatagctacagttatctttttcactgcaagtattatgcccacctggcagttatgatgcaaatgaatactgcactggaaactcaaaattgtttccagatcattaaggcttacctagactattcgctataccaccacctggctggctacaaaggtgtgtggttcaaatatgaagtcatggccatggagcacatcttcaacctccccctgaaaggcgagggcattgaaatcgtggcatacgtggctgagacactggtcttcaacaagctcataatgggacacctggatttggccattgagttaggctcccgagcccttcagatgtgggcactgctccagaatcccaaccgacattatcagtccctctgcagacttagcagatgtctccttctgaacagcagatacccgcaattgatccaggtgctggggcggctgtgggagctttctgtaacacaggaacacatcttcagcaaggcatttttctattttgtctgcttggacatcctgctttattctggttttgtttatagaacatttgaagaatgtttggaattcatacaccaatacgaaaacaacagaatcctcaagttccacagtggactcctcctgggactttattcctctgtagctatctggtatgccagacttcaggaatgggacaacttttacaaattttccaatagagctaaaaatcttttgccaagaagaaccatgacacttacttactatgacggaatatctaggtacatggaggggcaagttcttcaccttcaaaaacaaatcaaagaacagtcagagaatgcccaagccagtggggaggagctactcaagaacttggagaatctggtggctcaaaataccactggccctgtcttttgcccaaggctctaccacctgatggcttacgtctgtatattaatgggagatgggcagaaatgtggcctcttcctgaacacagccttgcggctctctgaaacacaggggaatatactggagaaatgctggctgaacatgaacaaagaatcatggtactcaacctctgagttaaaagaagaccaatggcttcagacgatcttgagtctcccatcatgggaaaaaattgtagcaggcagggtaaacattcaggatcttcaaaaaaacaaattcctgatgagagctaataccgtggacaatcatttctaacatgtcaaagaaaaaagattttaataagcactaaaaaaaaaaa

SEQ ID NO: 680 - DNA, 4964 bp, Homo sapiens
atcagcctcctgagagctgggactacaggcgcctgccaccacatccggttaatttttgtatttttagtagagatggggttttgccatgttggccaggctggtcttgaactcctgagctcaggtgatctgcccacctcggcctcccaaagttctgggattacaggcgtgagccacggtgcccagcctggctcctgttttttgagacggggtttcaccctgtttcccaggttggagtatagtggtgccgtcatgacttactgcagccttgaactctttggctcaagcagtcctccccactcagcctctctagtagctggggctccaggcatgaatcaccgtgccagactaagtttttttaaaattttttgtagagagaatctctctctgttgcacaggctattcttgaactcctaggctcaagtgatcctcctgcttcagcctccgaaagtgctgggattacggttgtgagtcactgtgcctggctcttttaatcttgaaaactctgggaagagctcacttctgtttaggaggctgccttgggaactgcatctcctgggctggtgctctgtgctgcttggagtctgcagaccctatctgggtcgcttggcctcccgtgcacaagctgccagaatggaggccccattctcaatgtgggggctgcccaaagagcagggagcttcccacaggacagaggctgggcacctgcttggcctggttcttccttttcccagggctccaacacccaccccctcaggtcctcccaaaccctgcaggtccctggcctggtccgtccacacctacactcaggaatctctacacatctctgagttgctgcatctgtcttcaggcacagcccaccagcccccctgggtacccaaagacaccgcaaatatcagccattccagacaacgtcctcccgtgtccctatctcatggagtaatgcctctaattcagccacaccaagaccccacgctccacatcccctagaactctcatctcctgtggcccaacatggcccttcctttcagcagtgggatgtgggaaggatcaaggtcacccttgtccaaatcccatgcagacaacggtgttggagtcttgggcccaaagaccagctcctagaacctgcagggaagcaacggcacgttccatctctccccatgccactgaggaatcattggtggcaggattctcagcaggcatggccgtgggtgcacagaacagagaaaggatggcctggaccacacacatcactgtgtgcagatgctttcctagacactgcagccaaggacacagaggctcagagagaataacctccatctcctgggtcccagcgattctcctgcctcagcctcttcctatttcacatgtagggaaactgaagcccaggtaggcaagcctgacttgctggagtcacacaggaagttggcagctctgctccatccctgggatctggagcccctgctctggggaaggagaggtggggcgctgccttccagagtcccctcaagctggcagggacggctgtacccccagggtcagaggagaactaaaaggagcggaagctggcctgggtccagggagagacctcgtgtttgcccaaaagggagctggagaggggcagctgggcccatatgcagggaggagctgcagggagctggtggcggggcagcaaagagaagtggatttggtgggtagaggggcccctccttggttctagtcctccccgcagccccttgcaaacaggcggggctctcctgtccttctctcctgcagcaagccctacatgaagaggcctctttggtgagtggcagctcaacctctgctaaatgcctccagtgatggggagttcactaccttccaaagtttttaaaagatgttaaccactgctattcaagaacaattctagaattttttttttttttttgaaagacaaggtctcattctgtctcgcaggccagagtgcagtggtgtgatcatagctcactgcagctttgacttcctgggctcaagcaatcctccctcctcagcctcctgagtacctgagactacagatgtgcaccaccacactggctcattgttttcattttttgtagagacgggatctcactatgttgcccaggctggtctcctggcttcaagcaatcctcctgccttggcctcccaaggtgctgggattacaggcgtgagccactgcatctggccttttttttttttggagatagagtctcgctctgtcgcccagggtggagtgcagtggcgtgatctcggctcattgcaacctccgccttccgggttcacaccattctcctgcctcagcctcccgagtagctgggattacaggcatctgccaaccatgcctggctaatttttgtattttttggtggagacggggtctcaccatgttggctaggctggtttcgaactcccgacctcaggtgatctacccgcctcagcctcccaaagtcctgggattacaggctgagccaccgcgaccggccctgctgttgcttctgaggtttgaaaaccgctgcctcaatgctcctgattcagctcttcttacccaaaggttcccccacctcatctactctgttcctgcacagtcgcccttttctctgatgccccgggcaggtttctctctgccagctccacgcttctggagtcccccatccgtcttggggcccagctgcccactgtctgggttcagaccttctcaacactccctggcttctctgccctagttttgccttctccaatccactcttggtgggtggaagtacggttaccatggtaacttgaagacaacgcaaatctgattgtatcattacaatgactgggaaaacctccagtgccacaaaataaagctcaagtcactagcttagcagtccaggccctttaccattccggcagcatttctgggggctattctccttccccccactgcacaaccccgcctggccaccccaggctcaggctgcagaacagcgtagaccagggagtggctttggggtcatgctaactacctggtttttgtctctttctggctgtttgctcagttgcaaaatgggaaggacaacagcacccgcctcacaggctaagaggctgtgtgtgaaaagcccgcagcacaggatctggcacgcgtggacgtgcgggatgggaggaggggatttcccagctcctcatctctgcagggactggccttggcctagggaacactagctgtccagggagggggagctttccctgagccccccgatgtgtggcaggcagaggagagcaagctacttctgggaggggagttgtggggaagggcaagttagtctttactgagggtggcagtgagctggcactttggtctcacctcggctgcagaaacccaccctgctcccgtcttatttcctggggatttcagctgtgtgcaggcacagatgcatctccgaagtgcctcatgcttgccttgatctcctctccttcctctggccagtcctgaacctcttggtgatccacggcggcacctctgtgtcctacatccttctctggccatctccttccctccttccagccctccctctaggaccctgaccccaaccatccttcatccccatggggacattcagtccactgactcatcaccctcccctgtccctctgtgagagaaggagcaggcagagaggatcttgcaagagccttcagcaactctcttccacccatcctgttgcttgctgctttttttttttttttttttccaaaaaaatagagatggggtcttgctatgtggctggtctcaaactcctgggctcaagtgatcctcctgcctcggcctcccaaagtgctggattacaggcgtgagccaccacacccggctccgttccctttctaagcagggtgctccttttcttgccatttcccccatcctccttcctctcccacagctcacttccctctctactgaatctgctgaagatcatgcagctgctgttcctgcctctaaaaccctctcttggctgggtgtggtgggtgacatatgtaatcccagcactttgggaggctgaggcaggagaatcacttgaacccgggaggcggaggttgcagtgagccgagattgcgccactgcagtccagcctaggtgatagagcaagactctgtcccctccctccaccaaaaaaataaagccctctctgcatccattccactctccactcttgctcattctctcctgccctctaaaaggtgatctgtctttggcagattcaatcacttgcctttctcattctctcctgagcccactattccactctggtccccaccacttcccccaaaactgctttgaaccatcgcactgcaacctgttgcttagcccctccatctagtctcaggcgttaggactgactgcccagcagaggctggtgcaaccaatcacctcctttagtaagtttctccctgggcttcacctcttcacctgtgggctttccacctgtctctctctttttttttttaagacagtctcctctgttgccaggctggaatgccgtggcgcagtctcggctcactgcaacctctacctcctgggttcaagcgattctcctgcctcaggctcccaagtagctgggattgcaggtgcccgccaccacaccgggctaatttttgtatttttagtagagtcggggtttcaccatgttgcccaggctggtctcgaactcctgaccttacgtgatcctcacgcctgtaatcccagcactgtgggaggctgagacgggcagatcaccctggccagcatggcaaaaccccatctctactaaaaatacagcaattagccgagtgtggtggcgggcacctgtaatcccaactactcaagaggttgagacaggagaactgcttgaacccggaaggcagaggttgcagtgagccgaaatcgcgccattacactccagcctgggtgacgagcgaaactccgtctccaaaaaaac

SEQ ID NO: 681 - DNA, 1326 bp, Homo sapiens
atggatgttaacagcagcggccacccggacctctacgggcgcctctgctctttcctcctgccggaggtggggggcaggctgcccgacctgagccccgacggtggcgccgaaccggtcgcggtctccgggacgccgcatctgctgagcgggggcccccgaggtgacggccagcccggcgcccacctgggacgcaaccccgggcaatgcctccggccgcggggagcaaatcaagaaagggccgagaaagttgtgatcggctctgtcctgacgctcatctctctgcgatcgcgggcaactgcctggtggtatctccgtgtgcttcgtcaagaagctccgccagccctccaactacctgatcgtgtccatggcgctggccaacctctcggtggccatggcggtcatgcccttcatcagtgtcaccgacctcatcgggggcaagtggatctttggacactttttctgtaacgtcttctccatgaatgtcatgtgctgcacggcctggatcttgaccttgtacgtgatcagcatcgacaggtaccttgggatcatgaagcctctcacgtaccctatgaggcagaaggggaaatgcatgacgaagatgattctttctgtctgccttctttccgcctttgtcactttacctaccatttttggtcgggctcagaatgtaaacgatgataaggtgtgcttggtcagtcaagactttggctacacgatttactccaccgcagtggcatcctaatccccatgtgcgtcatgcttttcatgtactaacagatttacaaggccgccaggaaaagcgcggcctaacacaggttacctggcttccctcgagtggagccagacagcagtagtcaccctgaatggcacagtgaagttccaggaggtggaagagtgtgcaaacctttcgagactcctcaagcatgaaaggaaaaaatatctccatctttaagcggaaacagaaagcagcgactaccttggggatcatcgtctgggcctccaccatgtgctggccgccctttttcctcctgacagccagacccttctgtctatggcactgcctgcagctgcatcccactgtgggtggagaggatatttccatggctgggctatgcaaactctctcattaacccttttatttatgccttcttcaactgggacctgaggaccacctattgcagccggctccagtgccagtaccagaatatcaaccagacactctcagctgcaggcatgcatgaagccctgaagcttgctgagaggccagagagacctgagtttgtcctacaaaactctgactactgtagaaaaaaaagtcatgattca

SEQ ID NO: 682 - DNA, 4915 bp, Homo sapiens
gagaatcagagagagagagagagtctgtgtctctgggaaagaagaacatctctgcttcacagtgatttgcgctgggggagaggcatcaattggcttcggacccaagggggagacgagaccaggtcaccccggttaagaccaagtgagcgttgcccctccctctcccaactctctacccgggaatgtctcggcgaaagcagcggaaaccccaacagttaatctcggactgcgaaggtcccagcgcgtctgagaacggtgatgctagcgaggaggatcacccccaagtctgtgccaagtgctgcgcacaattcactgacccaactgaattcctcgcccaccagaacgcatgttctactgaccctcctgtaatggtgataattgggggccaggagaaccccaacaactcttcggcctcctctgaaccccggcctgagggtcacaataatcctcaggtcatggacacagagcatagcaaccccccagattctgggtcctccgtgcccacggatcccacctggggcccagagaggagaggagaggagtcttcagggcatttcctggtcgctgccacaggtacagcggctgggggaggcgggggcctgatcttggccagtcccaagctgggagcaaccccattacctccagaatcgacccctgcaccccctcctcctccaccaccccctccgcccccaggggtaggcagtggccacttgaatatccccctgatcttggaagagctacgggtgctgcagcagcggcagatccatcagatgcagatgactgagcaaatctgcaggcaggtgctgttgcttggctccttaggccagacggtgggtgcccctgccagtccctcagagctacctgggacagggactgcctcttccaccaagcccctactacccctcttcagccccatcaagcctgtccaaaccagcaagacactggcatcttcctcctcctcctcctcttcctcttcaggggcagaaacgcccaagcaggccttcttccacctttaccacccactggggtcacagcatcctttctctgctggaggggttgggcgaagccacaaacccacccctgccccttccccagccttgccaggcagcacagatcagctgattgcctcgcctcatctggcattcccaagcaccacgggactactggcagcacagtgtcttggggcagcccgaggccttgaggccactgcctccccagggctcctgaagccaaagaatggaagtggtgagctgagctacggagaagtgatgggtcccttggagaagcctggtggaaggcacaaatgccgcttctgtgccaaagtatttggcagtgacagtgccctgcagatccaccttcgttcccacacgggtgagaggccctataagtgcaatgtctgtggaaaccgttttaccacccgtggcaacctcaaagtgcatttccaccggcatcgtgagaagtacccacatgtgcagatgaacccacacccagtaccagagcacctagactatgtcattaccagcagtggcttgccttatggtatgtccgtgccaccagagaaggccgaggaggaggcagccactccaggtggaggggttgagcgcaagcctctggtggcctccacaacagcactcagtgccacagagagcctgactctgctctccaccagtgcaggcacagccacggctccaggactccctgctttcaataagtttgtgctcatgaaagcagtggaacccaagaataaagctgatgaaaacacccccccagggagtgagggctcagccatcagtggagtggcagaaagtagcacggcaactctcatgcaactaagtaagttgatgacttcactaccaagctgggcactgcttaccaaccacttcaagtccactggcagcttcccgcttcccctatgtgctagagccttgggggcctcaccctctgagacatcaaagctgcagcaactggtagaaaagattgaccggcaaggagctgtggcggtgacctcagctgcctcaggagcccccaccacctctgcccctgcaccttcatcctcagcctcttctggacctaaccagtgtgtcatctgtctccgagtgcttagctgtcctcgggccctacgccttcattatggccaacatggaggtgagaggcccttcaaatgcaaagtgtgtggcagagccttctccaccaggggtaatctgcgtgcacatttcgtgggccacaaggccagtccagctgcccgggcacagaattcctgccccatctgccagaagaagttcaccaatgctgtcactctgcagcagcatgtccggatgcacctggggggccagatccccaacggtggtactgcactccctgaaggtggaggagctgctcaggagaatggctccgagcaatctacagtctccggagcagggagtttcccccagcagcagtcccagcagccatcaccggaagaggagttgtctgaggaggaggaagaggaggatgaggaagaagaggaagatgtgactgatgaagattccctggcagggagaggctcagagagtggaggtgagaaggcaatatcagtgagaggtgattcagaagaggcatctggggcagaggaggaggtggggacagtggcggcagcagccacagctgggaaggagatggacagtaatgagaaaactactcaacagtcttctttgccaccaccaccaccacctgacagcctggatcagcctcagccaatggagcagggaagcagtggtgttttaggaggcaaggaagaggggggcaaaccggagagaagctcaagtccggcatcagcactcaccccagaaggggaagccaccagcgtgaccttggtagaggagctgagcctgcaggaggcaatgagaaaggagccaggagagagcagcagcagaaaggcctgcgaagtgtgtggccaggcctttccctcccaggcagctctggaggagcatcagaagacccaccccaaggaggggccgctcttcacttgtgttttctgcaggcagggctttcttgagcgggctaccctcaagaagcatatgctcctggcacaccaccaggtacagccctttgccccccatggccctcagaatattgctgctctttctctagtccctggctgttcgccttccatcacctccacagggctctccccctttccccgaaaagatgaccccacgatcccatgagcctgtttttctgtacctgctgctctttgtcccacagagcagaaacagcttcacaaaaggacctcccagagttatgagccctgattttgtctttttctctaagttcttaacatgttatgtccctagtggcttttctgtagtccctgagcttggaaattactgtgcttacaaggggatggccccctaaggaatttttcttccctcctcattctttgtacctgaggaacatagattctctgcagctttctcaaggggaaccctctccagcttccctggtgtgacccttcttccccctcctctctcctctccctttccctttggtaggtgcacctgagcacctacatttggcattgcagcctagccaaaaagggctggcagctgtctctggagggcccagtgccactcctctggggtgacctttctgctcagctggtgggtatgggtcccctatctttctagaaccagtatgtggcattcctgtcaaatgggctgcccatgaagccctggaattccagctccacctccactaccactccaagcctggccccaccagtgctgtttggcctaggaactgtggctgggaaggtgcctccaacaatgggatccagggaagccaaggagaagacagcccccctcctatttcagcctcctgcacccaaggcagtgcctgagaagcccatcatagacaagaagtagcaaactgtacattccttcttcctccccctgctccagaaggtgccggtactgaagatgctccagtaattggtgacccaaccctaggaagtagggagaaatgaaggaagggcataggaaattttcccaggtaaatcccctgatggtcacattaaggtaaaggttttggctggtcagtgtgccaagacctctccagcttctcattcatgatgacctctcaaagttgggaaacaagctgatttcttgccaagaggtctcccaggagatatttgggaaatgtgaagttcgtatctttaaggagcacttttggtcagcatggttgatgaactaatgatgagagagttaaggaatgttgctagaacatagggcttgctggtacctatgtgactaagaaagggacatgatgtaagggaaaaggcctcaaattcttgtgaatgtggacattctcgttaatattcttttgggctaatagtgacatagtgtgcagaggtgtaccagggatcatgggggatttcctagcactagtatgcttctagttttagataactccctcctttattccctggccccttgtattttccttatcttcctctttcaagacccctacccattttgcctatccgtaggctggggcttgtgtctttgtcattgtctggttcttaagagtcccagactttgggagaccagctccaggtggcgtcctccctgcctctccgtcttgtaatgagttgtagtatttactcttaacataggatcatttggaacaggagttctgaggaggagagagtgagggttttgctattgactgacttgaacgatggcttctcctcaagctgtaggctccagagcttcctaacctagtaaaatgtcaagaacagacgggagatattagtgtctttccctctatcattaaaggtgttttaaccaagaaaaaaagaaaaaaaaaaaaaaaaaaaaaaaaaaaaaaaaaaaaaaaaaaaaaaaaaaaaaaaaaaaaaaaaaaaaaaaaaaaaaaa

SEQ ID NO: 683 - DNA, 3590 bp, Homo sapiens
gaaaacttgtccctaagggactttgtggtcacagcagttctgatttccttgtttgaaatttttgtaaactttccaacttctttgttttgcactcagtacttaaaaataaatttaatgccagaagtaaaagtactattattttcatcaatcataagttatagataacaaaaactcagaaatttttcttgaacataggtagggaacttaggtgaaaggactgctttaattccatctaaaagataaaacctaatactgacttacaaatatgttgctaagagtttagtgtctccaagtaaaggtagaaattttacattatctatcaatgatatcggcgaaaactaaaattattaggaagtaagctaagaataatttatagtctagatttttaacttaaaagtggaaccaatttccaatggtttcttcccttagttcttgagttagccatactgtgaccattaaaaaacatctttaaaatgtatgtgaaaaaacctgaagaaaatgtggcaaagggtaagatttgataagaaatgggtctaggtttatagggaatgcattatagtctttatagttatgtgtgtttgaaatataataaaacacttttagatgaattctttcttttttttttttttcctttttgagacacagtctcactctgttgcccaggctggagtgcagtggtgtgatcttggctcactgcaacctccacctcctgggttcaagtgatgcatgtgcctcagcctctggagtagctgggattgcaggcgcacgccaccacaccagctaatttttgtatttttagtaggagacggggtttcaccatggctggtgttgaactcctgacctcaagtgatacgcccacctcggcctctcaaagtgctgggattacaggtgtgagccacaacgcctggctagatgaattatttcctttagaaattattttctgtgtatctgcaaaagtgtttcattttagtactgtgaaatgaataggccctatgctgggtcctgttggggtttgtgatttatagatggtaaaatacatttcacacttacaagatgaagcaatctacctctatataaagagcttgcctgtgggtggttgtagcaagtgtcttcttattatttcacaattgagggcaagagagaggtcagaccattggtgaaacccttagtgcaagcaagtccgcaaataagctttttagctacttaagcctaggtgttttattggcattgaaggccaagacacacgagcaatacttgcacaatcaaaagttctatttttccaagacatgctggtcacacaagaaaaactgagataacatataatttatttttccaagacatgctgatcacaaaagaaaaactgagataacgtataatttagttactgtgtatccactttggatccagattgcatatctatatctgtctgtaaacagacatatgcacacatatatatacctgtgtgtatgtatatatgcacacacacacatatatatttaaaatcacagtacttaattaatttgcctccaaaactaatggccacattaatgcctttgagctaagttagactggctggaatcagttggcaagatcctggtaaatggttttggtgtcaactaggacacaagccaggtgtggtggctcatgcctgtaatccttgcactttgggaggctgaggcgggaggatcacttgaggctaggagtttgagaccagtctgtgcaacatagactccatctacaaaaaataaaaaattagccaggtgtggtggcatgtgcctacagtcctagctatttgggaggctgaggcaggaggataccttgagcccaggaggttgaggctgcagtgagccacgatggtaccactgcactccagcctgagcaacagcgagaccctgtccagcagggtagagtgcaaaggatgcctgtggaatgggagaatctgttcagcatccatcctcctgcttccaggctaaacccatgagaagagtgctgtcaacaaaagaagtgttccctacagtggggaagaattgaggttagcagaaagggtaaaacaagaacaaagtaattcctagccatccgaagaggtggaatgggaaaggcaacacctataacaggaaggaaatactccatctggggctgagcctgtcttattctgaggcccaagcttggctgcctttctcttcattccctctgtgtgccacttaacagtatgcatttcaactttcttttcagggaggggccagatgtagaaatgcctcacactacagtggaggagacctcaccagctacctgtaccagtaagatgggattagctcaggaaacgttgttgtttgtttgagggacaagaataacatgaaagaaggagcaagattaacagaacagctgacctagagctgctaggcactggatggtcctctgtgcttatatacacaatgtaatacttgtaaggaaaaagcaaaaggcttggaggaggctgtggactacctatagttgacagtattttcctttgtgggggtggtggatgtgggacgtagaatgtaaacttcctaccttatacattgatgttacttcattgattatagtgaacactttatagactgaaacaagtctaagaaaaattcatcttgagctgaggagatagagatgacctgccaaagatttcacatccacaaagtttgtatgactgatagttttaataaaaaaaatttgtcagccaaaacatactgagagtttcttagtcgtattaactgatctgaaactgttgccactaggggatataaaagatactacctgtattttagtgataaaccacaaagaataaaatgagtttttaattagcatcatgcagccacttaagtattagcaaagaaaatttgtagctgatctttcagttctctgtaatatagaaaaacagatgctgcatctctagttttgcctgtgcctgggggatatttaaaacttgtactaaaatgttaatttcgccatggtagaggtgacggggaaacttgcaaaaaaaggggaaagaggagggaattgggtgcatagaagtgagcatgaggccagcagtagggaatgagtttacaataaataaggtgtgagagtggttggggggagtgggagaggtttgggggctgggaagacaagggaaaagaaaatgcaggtatatgctatttgtgttcattttgtctttgaaaatcgtaagtgtacagcatcattctcgggcagagtctgggaggacttgagttgactgctacagtttatgatcttccctaaacatcgacgttcctggaaatctttggcctctgagctgacttcttctctgttgcttgtgagccaggaatttaacagctctgttgtatgtgcaggctgcagatgcttctcttcagcttttgctatccaatgtgtgtgtgtgtgtgtgtgtgtgtgtgtgtgtgtgtgtgtgtgtgtgtgtgttggataaacttaaaaaacctgttgcttccatgcaacggcccacacaacttgggactcatggtcagcctcaccttccacattggctaaaactctacaggaaacagtttatggagtttaaggaaaaaaaaaaaaaaaaa

SEQ ID NO: 684 - DNA, 934 bp, Homo sapiens
cactgcactggccttgatagggaaaccttccattctactgctggatgagccgagctctggcatggatccgaagtcgaaacggcacctctggaagatcatttcagaagaagtacagaacaaatgttccgtcatcctcacatctcacagcatggaagaatgtgaagctctctgtaccaggttggccattatggtgaatggaaagtttcaatgtattggatctttgcagcacataaagagcaggtttggacgaggatttactgtcaaagttcacttgaagaataacaaagtgaccatggagaccctcacaaagttcatgcagctgcactttccaaaaacatacttaaaagatcagcacctcagcatgctagagtatcatgtaccagtcacagcaggaggagtcgcaaacatttttgatctgctggaaaccaacaagactgctttaaatattacaaatttcttagtgagtcagaccactctggaagaggttttcatcaactttgccaaagaccagaagtcctatgaaactgctgataccagcagccaaggttccactataagtgttgactcacaagatgaccagatggagtcttaacacttccagcaaactcaatctcagcatgtgaccaatggcttcattttgaagaaaagccacagaagatacacttccgcaagatatcttcattttaaagtaaagtaatatactgtatggaaagttacaactgtgttagactaacaagtaattataaaaggaaatttttccttctaaggtcagtgagtgttgttgctactgaaatgaattcctgtatactcaacactgtgagcatgctaatgtatatgctggtgattcttatgcaaaggtgaagccacctcaagatgaatatcttaatttattactttcaataaaaagacagtttaaaaggcaaaaaaaaaaaaa

SEQ ID NO: 685 - DNA, 551 bp, Homo sapiens
accccatccgctggctctcacccctcggagacgctcgcccgacagcatagtacttgccgcccagccacgcccgcgcgccagccaccatgctaggtaacaagcgactggggctgtccggactgaccctcgccctgtccctgctcgtgtgcctgggtgcgctggccgaggcgtacccctccaagccggacaacccgggcgaggacgcaccagcggaggacatggccagatactactcggcgctgcgacactacatcaacctcatcaccaggcagagatatggaaaacgatccagcccagagacactgatttcagacctcttgatgagagaaagcacagaaaatgttcccagaactcggcttgaagaccctgcaatgtggtgatgggaaatgagacttgctctctggccttttcctattttcagcccatatttcatcgtgtaaaacgagaatccacccatcctaccaatgcatgcagccactgtgctgaattctgcaatgttttcctttgtcatcattgtatatatgtgtgtttaaataaagtatcatgcattc

SEQ ID NO: 686 - DNA, 1252 bp, Homo sapiens
ctttgaattcctagctcctgtggtctccagatttcaggcctaagatgaaagcctctagtcttgccttcagccttctctctgctgcgttttatctcctatggactccttccactggactgaagacactcaatttgggaagctgtgtgatcgccacaaaccttcaggaaatacgaaatggattttctgagatacggggcagtgtgcaagccaaagatggaaacattgacatcagaatcttaaggaggactgagtctttgcaagacacaaagcctgcgaatcgatgctgcctcctgcgccatttgctaagactctatctggacagggtatttaaaaactaccagacccctgaccattatactctccggaagatcagcagcctcgccaattcctttcttaccatcaagaaggacctccggctctgtcatgcccacatgacatgccattgtggggaggaagcaatgaagaaatacagccagattctgagtcactttgaaaagctggaacctcaggcagcagttgtgaaggctttgggggaactagacattcttctgcaatggatggaggagacagaataggaggaaagtgatgctgctgctaagaatattcgaggtcaagagctccagtcttcaatacctgcagaggaggcatgaccccaaaccaccatctctttactgtactagtcttgtgctggtcacagtgtatcttatttatgcattacttgcttccttgcatgattgtctttatgcatccccaatcttaattgagaccatacttgtataagatttttgtaatatctttctgctattggatatatttattagttaatatatttatttattttttgctatttaatgtatttatttttttacttggacatgaaactttaaaaaaattcacagattatatttataacctgactagagcaggtgatgtatttttatacagtaaaaaaaaaaaaccttgtaaattctagaagagtggctaggggggttattcatttgtattcaactaaggacatatttactcatgctgatgctctgtgagatatttgaaattgaaccaatgactacttaggatgggttgtggaataagttttgatgtggaattgcacatctaccttacaattactgaccatccccagtagactccccagtcccataattgtgtatcttccagccaggaatcctacacggccagcatgtatttctacaaataaagttttctttgcataacaaaaaaaaaaaaaaaaaaa

SEQ ID NO: 687 - DNA, 4428 bp, Homo sapiens
tgtttttgttgtgttatgtttccttgatttttcatgttccttggagttttgcattgctgccctcacatgtgaacaaggagtcacctcctccttcaatccttactaactgacttcaggatacaaagactttcattagtcagcctgacattctaggggtctcgcagacctttactatggatacacctgccccactcctcttgtttcctcttcaagaagaagctttatgtttgaatgtcttctcttgatcctgcaaagccaggctgggtgctgactgcctctcttttgtttttcctagggcattgccctgaagtactcaaagttaattgccttctcccagtcccagagagttaagccagatgtctgtgtgtgcttgtgcatgatttgcagaggctatgggtagggatggacagaagggcatgcagagtgcttggagacacatacgagaaagttaaatgggtccacaagtgttgcatcttttgatgttcatgggcagggttcatggagttcatgatgcaatgagtagaaacaatggccctttgtttagttctttactgaagttgctgtgagctctcaccccttttccctgttcttagctttcccaagactattcaactgagccagtttcttctgtgttatgggtgaagtgagataaaagtaggcctcttgggcaacattctgactagctatgctttcactttcccctgtgaaacaaatcgtgggccaagaatgtctctcttggcactgagctgtgtgctgccttgggaaaggggtgatgcaagtaaaatgaaactgttttccttaccctcttcaaggtaatcgtggatcatttttttctcccatggtgcgttgggacctctcccctggtccctgggctctacctaatatacttttgtctgtgggtagttgtcaaaattggtgttgctatggggataagaactgaaaactcttatcccaccatctttctaatgtcactcttctctgaatggattacattagaaaagaacaaggtgttcaccttctttaatgatgtagttacaaggaatctacctctgggagagacagttatgttttcataaatcctaaggcaaaacattagatatgaattctttttatttttatattttctttttctttttcaattctatctatctatctatctatctatctatctatctaatctatctgtctatctatctatctatctatctaatctatctatctatctatctatctatctatctatctatctatctatctatctatctagtagagacagggtcttactgtgttgcccaggctggtctcaaactcctgggctcaagtgatcctcccacctcagcctcacaaaatgctgccaccatgctcagccagatatgagttctttttctaaaggaagggtttatttaaaaggagtcatagaccatcactggattctagtttcctgagagacatagagggtactctggcattgaagagagacactagaaggatggacatttttggaatgtttaacaagtctctcactttacagcatcagcagcagagagtgttaagcttgaaaaaataagaaaaaagtataaaattatgatcttagtgaattaatgacatattgccaagacttaggccatcatttatatattaacattaatgggatgtgaatgtttataataaaagacaaaaagatgagcttaaagaaattagacctattacccaaacataaatatttacttttacatgttgtcagagagtatttgtacctgtcatattgctgttttgcaaattagagagttaaattgactcctttttatagatattctatttccgtcctaaaactctttccatcactaaatctctcactaaactttgtggtgttacataatcctcactttctagttagtggcaatcataaaaacagataaaaaggctttcattattaggagtggcatggatgaagtagttgatactattggcaagatagaacatgacaaagagagcatgaccattatgacttatgcattaagtgaggtgttttgggctctttctggctatgcaccatatggtaaggaaatgatatctctgtcaggatagactagattgtaatgcagtaacaaatgaccctacttaaaaaaaattattgttatttgaatatttgcaaaatttaaggatcatgacatcatgatgaacatctatagaaatacatagctctctacctaagtacaaaatagagatatagagataaagtacaactgattcagatagttaaattattatgctattatttaatgttctcatgtgcagttttatgtattccagataatctttctaaataacttatgtagacatttatattttggtcagtctatttttttatttccaagtaatttaatttttgtcccaattgaattttaagaatagagctaaattaaaactgttactcagagctttttattcacttttatgttaataaagggttccttagagatgatatacctagttttctgtaagtggtttttattttcttggtaatctacaagtcagattttaggcaacacctgttgaaaaaaggttagggcaccatttacatgtttttcaaattgtaaagttctaatgcaggtttctgcagttagaatattcatgacacaaactgtttcaaatacaacttaaattgagattcaggtttaaatgttgatttatgaaagttcttctttaatgaaacttgtttttatgagatctctgaattgcaagaagtaggacttcagctttggaactgaaatagctcttggctatttgttttaatcactttccacacaaacctcacttctgaacggtcatcttatttagagttattatcaacttacttgccttagtgctgacattgttgatggattcgaagaagtgaaattggcaatcctgtatctaatgctagtgtctttggaacaacaaaaggagtttcaaagggaggctgaaattgaacacttaatattataaatcatgatatatgtatttttttgttttgtcttgtcttttactttggagaggggtttctttactgcatggacagttgtattcattaaatatatagaaaggtcatggctttcctaaaactttgggctgttctttaaaaattaatcttattctcatcaggagtttgtcacttctaaactgatctgagttaatttattggaactgtgagtaagagacattacataatttgggcacaaggagagaatctgtgtcctggaacttgctgatggcaccttcaaaggtgacccagttgaccagaaagtgttgatttccactttgtaattttaaaaatatatgacaatcaaagggcatttcatgacccaggagggagtggaagtagcaaataagcatgattattgcaaaagcttactagattgagtagaaggaatatgcactgctgtcaaaaagttgcaatgtaaaatagtcaaaactttttctatggctctgatgatagcaatcaacaaaatgaggaaaatgatgtggcaggattcagaatctgactaaggagtactaacagagaaaattatcatgttcttggctttagagacaaataaatgggccatgtgggcccaatcttttgtaacttaaaaaatgggaaaagctacgggagagttaacgttaccattttatgccttaagtgagatgttttgggctctttctggctacaaggtttggaaccacaattggattaatggtagttggctttaatggtccgtgggaagctaaaggttacaggcaatcatttcatcagcctcctggctggcctcaatggaaataaaattgtcagactgtaactttaaggaggctgagttagcaaatatattaatttcctattgttgttgttataaattattacaaatttagtggcttaaaacaacacaaatatattatgtcacggttctataagtcagaagttcaccatgggtctcactgggctaaatcaaggtatccacaggaggctgcaggaaacacgtttctttgccttttcaggcttctagaaactccgtgcattccttggctcatggcccctttttccatcttccaagtagcagtatagcattaccacaactacttcactgactctgcttctgtggtcatactgccttctctcgtctgtaacctgaccctcatgcatccctcttttcatttactgaaaaagcaatgactgtgacatgactaaataaagaaaatttatcatatttcttaaaataatgtatcaaaataattgtatttatcaaaatgacagcaaattaaaaatttaaaaagaaaacagataacaaatcaatacgcagggtatgaaattactccagatgaaatgaatggacaagtgattagaaaataattatattcatggttgctcaagatataaagagatagcagttactaaaaaaaaaaaaaaaaaaa

SEQ ID NO: 688 - DNA, 1137 bp, Homo sapiens
tggaactagaatttaggggcagttggatgaaattgcaaatttagaaggggaataagaattttctagtgctatataaagaaatgatgatggagacaaaagccttgctttcctctttttagaatttattttcgatttttagcatactgtggggcttttagagctaatatgatctaaattcagaaaatttaattttcatagtaggccaggtgtgaattacttatgtttgctatagaatgcttatttagactaacaataaatttactttgctttctaaggccagtcagcgaatgtggggatgaggcaggatgttttaaatgagccagagatgatccacaaagtgaacagtcgacacagaggtctttgagttggatggttgcaaatatattgacattagagtgaaaactccttcctttgggtaaactaaagaaagataaagtatactaaaaaattttaagatggtgttatacaaaaaaaagtttgggtctaacgtgtccacaaagactgtcaagtgaagaatggtggagattcttggtgtttgagcagccaacctggatgagtgacttcagggacagagcagaggaaagcaaaatgaatttcctttatttacccaaaacttgttgactgaatttttgtataggtccgggaaaataagcctaaacaaatagttgtagccttagaaaaactgttttcccatttctttctgagttagaatcagcatagcctccctgtcgccttaaatgtaaaaatcctattttgattaataccccagcctaagagttatagcaatacgagagactgaatctatttttgtttcgggtctttacctcatagtatgaaattagtaagacactgcatagattttgccctgaatactggtgtgcccaggtatgccgtgctctctctctgtttccagtggtggtaattttaaggcctaaagaaagctggggttaatcctgaagctaaaagtaaatgtttcttgaattgattttgttctgtggtacaaataacatctatgaatatcatatctgtatatatctgaaccaagttgtgtgcagagaggttgatataactatatttacagaaaatgatttttacaattaaagttcacattttaacatgaaaaaaaaaaaaaaaaaa

SEQ ID NO: 689 - DNA, 1516 bp, Homo sapiens
gccggctacaggaaattgacttaggcacaggaacttgctaatctcttttgtcacattcggattgctcctgctgccccacacacactaacccaaccatcttggggtggactccctgccagcccaactgttgtattttcagttcttccagtgtgaatcagttaatattctcgggaacgagggagaggttgatcctatgaggaaatcaaccacagtgaaaaggcttgggccgcttttgttttcacctgcttttgttgaacaaatttgatttccggagtcagtcattttactgtcaagacatttcttcggcattctgcaacagtttccaacatggctagatccatcagaaactgaagccgtggagaacgctctcggggcctttgccacttcttggagtagaagccgacagagagctgtttggaaacttctccttcacacaccagttgaagactaggctttggaggttttcaaagcagacggtgcttggatgggcagggagaagtaacattctgcaaatcgccgtcagaggtcctgaggacacagacctacctggcttgcattccccttgctgaatggcgtgtgctgcagctgcccactgagggctcttttccctgggattctggacttcagagtaggacagcaggctgggaagatgctgagttccatcaagtgcgtgttggtgggcgactctgctgtggggaaaacctctctgttggtgcgcttcacctccgagaccttcccggaggcctacaagcccacagtgtacgagaacacaggggtggacgtcttcatggatggcatccagatcagcctgggcctctgggacacagccggcaatgacgccttcagaagcatccggcccctgtcctaccagcaggcagacgtggtgctgatgtgctactctgtggccaaccataactcattcctgaacttgaagaacaagtggattggtgaaattaggagcaacttgccctgtacccctgtgctggtggtggccacccagactgaccagcgggagatggggccccacagggcctcctgcgtcaatgccatggaagggaagaaactggcccaggatgtcagagccaagggctacctggagtgctcagcccttagcaatcggggagtacagcaggtgtttgagtgcgccgtccgaactgccgtcaaccaggccaggagacgaaacagaaggaggctcttctccatcaatgagtgcaagatcttctaaaccccaagagacttcacacaacacttatgtatgcaccccaaagactaatggggagagggagggccgggaagccaggaaagcttggtgttttctctgggtacaccccaagcagcgtctccttttggatacagttattgatgaggcttggccactggatgttttcactaactacactctacaagtgaactccttgcccaggccagttagaaaatcccttggggaactgtgatgaatattccatctttgattaaaaaagtgaaatagtctccataaaaaaaaaaaaaaaaaaaa

SEQ ID NO: 690 - DNA, 1214 bp, Homo sapiens
gtctacaccccctcctcacacgcacttcacctgggtcgggattctcaggtcatgaacggtcccagccacctccgggcagggcgggtgaggacggggacggggcgtgtccaactggctgtgggctcttgaaacccgagcatggcacagcacggggcgatgggcgcgtttcgggccctgtgcggcctggcgctgctgtgcgcgctcagcctgggtcagcgccccaccgggggtcccgggtgcggccctgggcgcctcctgcttgggacgggaacggacgcgcgctgctgccgggttcacacgacgcgctgctgccgcgattacccgggcgaggagtgctgttccgagtgggactgcatgtgtgtccagcctgaattccactgcggagacccttgctgcacgacctgccggcaccacccttgtcccccaggccagggggtacagtcccaggggaaattcagttttggcttccagtgtatcgactgtgcctcggggaccttctccgggggccacgaaggccactgcaaaccttggacagactgcacccagttcgggtttctcactgtgttccctgggaacaagacccacaacgctgtgtgcgtcccagggtccccgccggcagagccgcttgggtggctgaccgtcgtcctcctggccgtggccgcctgcgtcctcctcctgacctcggcccagcttggactgcacatctggcagctgaggagtcagtgcatgtggccccgagagacccagctgctgctggaggtgccgccgtcgaccgaagacgccagaagctgccagttccccgaggaagagcggggcgagcgatcggcagaggagaaggggcggctgggagacctgtgggtgtgagcctggccgtcctccggggccaccgaccgcagccagcccctccccaggagctccccaggccgcaggggctctgcgttctgctctgggccgggccctgctcccctggcagcagaagtgggtgcaggaaggtggcagtgaccagcgccctggaccatgcagttcggcggccgcggctgggccctgcaggagggagagagagacacagtcatggcccccttcctcccttgctggccctgatggggtggggtcttaggacgggaggctgtgtccgtgggtgtgcagtgcccagcacgggacccggctgcaggggaccttcaataaacacttgtccagtgaaaaaaaaaaaaaaa

SEQ ID NO: 691 - DNA, 1023 bp, Homo sapiens
acctgcagtcccagctactgggcagcctgaagcagcaggatggtgtgaacccaggaggtggagcttgcagtgagccgaggtcgcgccaccgcactccagcctgggccacacagcgagattccgtcagaatcagttacttttcgggcacagccccaggccacttactgtgagcctttttctttctcaacaccacattccccacagggaaaacacatttctcacctcaaaagaagacaagacaacgagcaaacaagaaggagcagcaggaggggttctgagccgaggatgccgggcagacatgagggagacacgcacccccgaatccaaccagtgcctcggcacaacgacaaatgtcttcacgtcacagacctttagaagctcctgggcagacctgaaccaaggctcctgactggtctgtttggctcacatggtgttgagattttgccatcactcaatattcagatttcttataaatatccagatttccagcttctcttggaaaatcagaaaaaaacagcactgaactcctaggcccacaaggcactccccagtgaacagatgaaactgtcctctgctgcggggcaggagtctccaggtcacccccatccctccccacctgcctggaccctgaagaagccttctgagtctgtggctcaacgtgcgatgtgcagtgcaagggcctgccccgtagcctgccccgtaggctgccccgcagcctgccccgtaggctgccccatagcctgccccgtaagctgccccgtagcctgccccgtaggctgccccgtaggctccatggccactgccccacaaggcctgtctccacaggaatgggaagcggacagggagacgggcagcagctcacatgctgggacaacgcagtgttcaatccattctccatccagcagctccagacatctttccagaacacaaacctgaccccatcacctctctgcttagccactggcttaaactgccaatggtttgcctgcatgtaaaataaagccattctttaccattaaaaaa

SEQ ID NO: 692 - DNA, 5399 bp, Homo sapiens
ggggaagcttcgcaggcgtgcacggagcagtgagatcactggcgttataaatatcccggtgccagcgcggagatccgctcgggtggcctctctcttcccctctccccttctcttccccgaggctatgtccacccggtgcggcgaggcgggcagagccagaggcacgcagccgcacaggggctacagagcccagaatcagccctacaagatgcacttaggacccccgcggctggaagaatgagcttgtccttcctcctcctcctcttcttcagccacctgatcctcagcgcctgggctcacggggagaagcgtctcgcccccaaagggcaacccggacccgctgccactgataggaaccctagaggctccagcagcagacagagcagcagtagcgctatgtcttcctcttctgcctcctcctcccccgcagcttctctgggcagccaaggaagtggcttggagcagagcagtttccagtggagcccctcggggcgccggaccggcagcctctactgcagagtgggcatcggtttccatctgcagatctacccggatggcaaagtcaatggatcccacgaagccaatatgttaagtgttttggaaatatttgctgtgtctcaggggattgtaggaatacgaggagttttcagcaacaaatttttagcgatgtcaaaaaaaggaaaactccatgcaagtgccaagttcacagatgactgcaagttcagggagcgttttcaagaaaatagctataatacctatgcctcagcaatacatagaactgaaaaaacagggcgggagtggtatgtggccctgaataaaagaggaaaagccaaacgagggtgcagcccccgggttaaaccccagcatatctctacccattttctgccaagattcaagcagtcggagcagccagaactttctttcacggttactgttcctgaaaagaaaaagccacctagccctatcaagccaaagattcccctttctgcacctcggaaaaataccaactcagtgaaatacagactcaagtttcgctttggataatattcctcttggccttgtgagaaaccattctttcccctcaggagtttctataggtgtcttcagagttctgaagaaaaattactggacacagcttcagctatacttacactgtattgaagtcacgtcatttgtttcaatgtgactgaaacaaaatgttttttgataggaaggaaactggaattctttgtactaatacagggagcacactccttcagttcagcaagacataaagccttttgctttatgcttgagggatatttagaactttgtattttcggaaagttaaataacagggactacgtatttttctgacttttacagattaacctgaaagaacatacatgatacatttttatttttggtttccaaagaatattttgatgcagataaaatattttgttaacttttgtttttttttgtttgttttcttaaaagtacctctgcattgagcatattttcttacttttattattttaattaatatgacataagcaatcattttatgctgtttatgaattataaatgtgtttatagctcatttgtaatatggaaatcttttacatttttcctattcactgcacttttttattgtttttatttctagccatacctcagataatatgtttagttttacattttaaaatgtttaaattctctttcacagcaccaaaggctcagcttggatttgtgtgtatgtgtatgtcaattcatgacattatgtggaatcctaaacctttggtggctgggatatgatgggttagaagcaaggagaaaatataaggactttttgatggaattaaatgtgggaggtaaggaaaaggatttagaggtaaaagtacactaagtttgcaacatttattgagatctaagtctgtcttgccttcatttctctttttatctcccccttgccctcattcttgaacagctggaggaatacattttattctgtccatgaagcatacactatgaaattcaagtgcttaaaaatacttctatgactctctgctatcccactgtatagatccacagggagcaaacacttagaaatgatagagaactgaaggagatcaatggtttaacagttatccatgccaagtcccattgtcagaaatattcttattactcagtcaaacactctttgagcttcccttcctaaaggtaaccaatccagtgaatagatgtgcccttttataaggaaacttctgatgtttattaaaaaaactggccttttgatagaggtaacttaatttgggaatttgttgtgttgaaatggcatttaatttcaacctaaatactgactgctggacataaatcacagaaaatttaacttaagaaaatttacaaaatttattctcaggtaatcattttaataaagttctgcaaaatacacgtttatcttacattcagaaatgtggcaaaaaaggcatagctaaaggctaaacatatggctttagtagtaacaaaagggttcatagaaacttcatggtttgcatttaaacatgtttaaagtgtacttataaactatttttttcttaaagcaaactatgatttattttggtgcacaaatacaaagtggaaacttaccaaaattgaactagctaccatataagcagattgctttaatttgatgggaaaatagtacacacatatatataacaaataatatattaaaaaacccatccatcaactaaaacattatatgtatacatcagtatagtgttttattataaagccaattatctgattaagcattctttccactgaatgcataatgtttaaatagcataaaatgaaatgctacaaaaattgaactaatttatactttaaagtatttctgggttaaatgaaacaatgaaattttttagtatgttcaactctcatccaaatggcatatgaccctgtttacacagcctaaagctaaaaatattactctagtttattctaatctattgttaagtattgtgcactgtataccaagttcttagggcacatgaaaaattttagctgccaaacaggaactagtaaacatatgttcctaataagtgaagggaaagataataatgatggtcaacaataagccacgtcaatgcataagttgtataggctaaatgttgcttgtaggctacattaaactcaaatgtaatagtttatcttatactcctggtttgatttgattagcatattaacgtgaaagtaggatagctactaaatatatattatgcaagtcaggaatcattaatttcaaaatttaaagccatgctaaaattaaaaagaaaatattaaattacacaattacacttgtctttactggccatacaaaatgattttttttttttttttgagacagagtcttgctctgtcaccaggctggagtgcagtggcatgatctcggctcactgcaacctccaactccctggtttaagggattctcctgcctcagcctcccaagtagctgggattacagactcatgccaccacgccagctaatttttgtatttttagtagagacggggtttcaccatgttggtcaggatggtctcaatcctggcctcttgatagtcctgacctcatgatctgcccacctcggcctccccaaagtgctgggattacaggtacaatgatgtataattaatgcttagtgaagcataaagttacctacatcaattaattaaatgaacttatgtacagaaaacatgtataaatataagtctatactaatgcttacaactttctaagagggttcttgcttatgtagctttttattattttaagtaactagaaccaccaaatatcaaataaaattatttggttatggttatgttcatctaaacacaacaataacttttatattaatatttaggagtctattttgtctataggtgacaaacatctccagactaacatgtcagttttatcaattatattatgtttaattatttaagatttctttatgtggaacatctatagagataaatagaaattttcaataagatgtagtaacactgtgatttatctttcaagagtctctcttcacttccttctaaagagactaatttgagagtacaggtgcatattaattttcttggttctttcagctgaattatattggtccagaagttcaaaatcatgtgacaataataagggatactgacagaagttatttccaagtttgtgtatatattataaaaattacatatataaaactaaggcttttatttctgttatttttaagcttttatttcttgtagctaaaaataaaacatcataaatctggtaggtaaatttcttattaaatcaatcttgaaatagaaaatgtaataactttcttaccattaacattttttacccttccatagaagggagggaataaatcatgacttatcccattttcaataacaaaacgaaactatggcactaaccaaaaacttgcattctggcataatttttacagttgcagagaattgtttctgggctcattaaaaaaagtagtattgcagacattgctgcaatgggaagcagacaataacttcttaaaggaattctacacctcctttaagatttacttaattgctacatctaaattctgataatttaaaatccattttaggtgataaaattttttaaaagttttgaaggaaacctctggataaatggacaaggcctaatttttttttgtagtcaatccaactgtactggccaatttttgaaataagattatatgattaggtattagcagagacaaagagttacctcctccatcttactctgccctatttgaaagtctcaggggagaaaagggaacaagatgctgatccaacctgagtggagtcaggtgaggcatctttacatctaagaatttttttttaaattttattattattatacttcaagttctagggtacatgtccacaatgcacatgtctgtcacacatgcacacatgtgccatgctggtgtgctgcacccaccaacctgtcatccagcattaggtatatctcctaatgctatccctcccctctccacccaccccacagcaggccccggtatgtgatgttccccttcgtgtgtccatgtgttcttattgttcaattcccacctatgagtgagaatatgtggtgtttggtttttggtccttgcaatagtttgctgagaatgatggtttccagcttcatccatgtccctacaaagaacatgaactcatcattttttatggctgcatagtattccatggtgtatatgtgccacattttcttaatccagtctatcattgttggacatttgggttggttccaagtctttgctattgtgaatagtgctgcaataaacatatgtgtgcatgtgtctttaaaaaaaaaaa

SEQ ID NO: 693 - DNA, 1035 bp, Homo sapiens
cggcacgaggtctttttgtataactaatctcaaatgttatttggagtgagaaagagtttaaacaaatatcactaatgaccctaacttcactttcttgtgaggtgtggcagtccctggaccctgattccctgtgggcaactggatgcgctggagcttctggtcctacagagctgggattaacccagctcttttgatatgttgctcagggttcttggttccacaatcagactaactcaagctgtaagcagaaaacaaatttattgaaaggaggtcaaatagtttacaagagagctaagaatgctggtgaatgaggcctggtgtatgggaaaaaacacaggaagcaaaatagacccaagatggcatgtgaagtctgtttaagaggctaccattggcattgtcaccatgaccactagctatgatttcaccagccacacctgactctaccctccatcagaggcaccaaccttaatctctaaaggttcactggaaatttgcattgctcagtgaagaatcaaatcctagccagatgttcctagtggcctgagcttccggggaaggaaatgtctaaccctttgggcttgggctttctttattggtatttcctgaaataggagggcagggcaggcaaaatagtcaaaagtccacttcacttggtgaccctgtgaggctctaccagagcagccagccaactcatgtccctggtttattgtcacctctttttttttttttttttttttcttgagacacttgttgcccagactggagtacagtgagccaatatcgcaccactgcactccagcctgggcgacagagtgtgaaactctgtctcaaaaaaaaaaaaaaaaattcgccagttcttttctctgccctattgaaccatatatgccagagaaagagcccccaaactgtgttttttaaatgctgcaggtaatcattttcatctggaagttctgggaaaattgttctaagccaacctgtgatctcagcaaataaaacactaaacaaataccaaatataaaaaaaaaaaaaaaaaaa

SEQ ID NO: 694 - DNA, 446 bp, Homo sapiens
ggaggtcctcctcctaaaaagtctgctccttctgctgtggtaagaagcaataattggatgagaggccaaggtcccatatcatgtggaagagagaattatggaggtcctacacgtagacggccaatctcttcctggagaaatgaccacatgtctctaagagacgatggttatgcaactaaggagagaaatcatccaagctcctgagaagctaggacgccacctagagactatgcataccatgattatggtcattctagctggaatgaacattcttctagaggatatagcctgcagggacctctcatggtgcaccacctgcacgagggcctcggatgtcttatggtggaagcagccgccctgattataacaatacactagatagatatggcagaagtcaggagagttactcaagaagctgcggtgatttttatttttgtggtcatgag

SEQ ID NO: 695 - DNA, 683 bp, Homo sapiens
gttccagtgatgctgggagaaagagaggcccgggcaccccagcccccactggcctcagcgcccctctgagcttcatccctcgccacttcagacccaagggagcaggcagcacaactgtcaagatcgtcctgaaggagaaacataagaaagcctgtgtgcatggcgggaagacgtactcccacggggaggtgtggcacccggccttccgtgccttcggccccttgccctgcatcctatgcacctgtgaggatggccgccaggactgccagcgtgtgacctgtcccaccgagtacccctgccgtcaccccgagaaagtggctgggaagtgctgcaagatttgcccagaggacaaagcagaccctggccacagtgagatcagttctaccaggtgtcccaaggcaccgggccgggtcctcgtccacacatcggtatccccaagcccagacaacctgcgtcgctttgccctggaacacgaggcctcggacttggtggagatctacctctggaagctggtaaaaggaatcttcctagcccagaccctggagctgaaggtcacggccagtccagacaaagtgaccaagacataacaaagacctaacagttgcagatatgagctgtataattgttgttattatatattaataaataagaagttgcattaccctcaaaaaaaaaaaaaaaaa

SEQ ID NO: 696 - DNA, 1585 bp, Homo sapiens
tttttttttttctttttttcttttcttgttttttttttttttttggcgtggagcatttccgaactttcacgtcataaaaaatgcagcatagttaatcagcagcttgcacttctgagggcacattcacctcgggggaggaggaaggaggaggagctggtgggtgctgagactgcagtgtcctccttcccagcagctggacccagagaccaggcaccatatttttttgatgaaattatcctaaggaaataatcaaatttgtacagaaatttatgttaaaaaatgttcatggcagcaccgtttaaaatggggagaaaattggaaacaacagaattgtagcaatacatatgatcattaaaaattatgttttagaaagatttttaacagtctttggaaaaagttggtgacatgttgctagtttttaaaaaaagtacagagtatgtacagtatgattccaattttgtgtttaaaaattagacatagtggtaacctagcttcagttccagataagatggagaaggcatactcctttcatgtctcccactgaatgcagctataaatcctggagagtagacagggagaaactatttgaggactctggaacaaagacatagtagcaatcgactggtgaagaagacaagaatttgaagtacggtcaagtatctgtgggctccacatctgtagatacaacctacatgtattgaaaatatcagaaaataaaaataacaatacaacaataaacatcaatacaaataacacaccaatacagtatagcagctacttacataacactgacattgtattaggtagaagtaatctagagatgatttaaagtctgtcggaggatgtgtgtagcctgtatgtaaaaaccacgttattttatatgggggactttagcatccaaggatttgaatatccacgggggtcctggaacaagttccccatagacaccaagaaacaactgtattcctgaaacagtcttgagttatcattttctttcttctccctctatgtatgtacatagagtgtacatacatagagtgagaagcaaagaaggtccatgaaatggaccaattcttttgaaaactgcaaattaccacagttcatctaacatgaaatagataacctgaatggtccaataactagtaaagatattgaattaatagtttaaaaaccttctgaaaggtaaatctctaccctaaatgatttcactggtgaattctatcaacacatttaatgaagaaaaaactccagttctaaacaactttcagaaaagaagagggaacacttcctcactcattatatgaggtaagcattgccctaataccaaaaccaatgttaacacaaaatatgaaacctacagaccaataaccctcatgaacataaatgtaaaaatcctcaagaaaacattagcaaatttaaaccagcaggatataaaaggaataataatacaccataacaaaaaaagaaactatccttggaatgcaaggctggttcaatatttgaaaatcaatcagtgtaatctaccatattaacagtctgaagaagaaaaatcatgattatatcaatacaaaaaaaaaaaaaaaaa

SEQ ID NO: 697 - DNA, 7299 bp, Homo sapiens
ctccgctgcctgagtcctcggcgaacatggcggcccccgagtcagggccggctttgagtccaggcactgcagagggtgaggaggagacgattctctatgacttgttggtcaacaccgagtggccaccggagactgaagtacagcctagaggcaaccaaaaacatggtgcatcctttatcatcacgaaagcaattcgagatcgtttattatttttacgccaatacatctggtacagcccggcaccttttttgctccctgatggactggttcgcttggttaataaacagataaactggcatttggtacttgcaagcaatggaaagcttttggctgctgttcaagatcagtgtgtggaaatcaggtctgcaaaagatgattttacatccattattgggaaatgtcaagttccgaaagacccgaaaccccagtggagacgggtagcatggagttacgattgtaccctactggcctatgccgaaagcacaggaactgtgagggtgtttgatctcatgggaagtgaactctttgtcatttccccggcatctagttttataggtgacttaagctatgccattgctgggttgatatttttagaatataaagcaagtgcacagtggtctgcagaactcctggtcatcaattaccgaggagaacttagaagttaccttgtaagtgttggaacaaatcagagctaccaagaaagtcactgtttcagcttcagtagtcattatcctcatggaatcaacacagctatttaccaccctggtcacagacttttacttgttggtggatgtgaaactgctgaagtaggcatgtcaaaagcttctagctgtggcctttctgcctggagagttctttcaggatcaccgtattataagcaggttactaatggtggagacggggttactgcagtaccgaagacactgggattattaaggatgttaagtgtcaagttttacagtcgccagggacaagaacaggatggaatttttaagatgagcctttctccagatgggatgctcctggcagccattcacttctcagggaaactgagcatctgggcgattccatctctgaagcaacaaggggaatggggtcaaaatgagcagccaggctatgatgaccttaatcctgattggaggctctctactgagaagagaaaaaaaatcaaagataaagagtccttttacccactgatagatgtcaattggtgggcagacagtgcagtgactttagctcgatgctctggtgctttaactgtttcatctgtgaaaactttgaagaatttactgggaaaatcctgtgaatggtttgaaccatcacctcaagtcactgctacccatgatgggggatttttaagtttggagtgtgagattaaacttgcccccaaacgatctcgtttggagactagagctggagaagaagatgaaggagaagaggattctgattctgattatgaaatatctgccaaggctcgctactttggttatataaaacagggcctttacttggtgactgaaatggagcgatttgcaccaccacggaaacgcccacgaaccattactaaaaactaccgccttgtgagtttgcgctccacgacaccagaggaactttatcagaggaagattgaaagtgaagagtatgaggaagccttgtccttggctcatacctacggcctggatactgaccttgtatatcagaggcagtggaggaagtcagcggtcaacgttgcttcaattcagaattatttgagtaaaataaagaagcgatcctgggttctccatgagtgtttggaaagagttcctgaaaatgtggatgctgcaaaagaactgcttcagtatggattaaaaggcacagacctggaggctcttttagcaatagggaaaggagcagatgatggcagatttacattacctggtgaaatagacattgacagtatctcctatgaagagctttcaccacctgatgaagagcctgccaagaataaaaaggaaaaggagctcaagaagagacaagaactactgaaattagtgaacttttccaagttgacactggaacaaaaggaactttgccgttgtagacggaagttattaacctacttagatcgacttgcaacatatgaggaaatcctaggagtgcctcatgcatctgaacagagatatgatgctgaattctttaagaaattcagaaatcagaatattgttctctcagcaagaacttatgctcaggaaagtaatgtacaagccctggaaattctgtttacttaccatggttccgacctgcttcctcatcgccttgcaattctgtccaactttccagagaccacttctccacatgaatattctgttttgctgcccgaagcttgttttaacggtgactccctgatgatcattccttggcatgaacataaacaccgagctaaagattggtgcgaggagttggcttgcagaatggttgttgagccgaatctccaagatgaaagtgaattcttgtatgctgcacagcctgagttactaaggttcaggatgacccagcttacggtggagaaggttatggactggtatcagaccagagcagaggaaatagagcattatgctcggcaggtggactgtgcattgtcacttattcgacttgggatggagcggaatattcctggtttgctggttctctgtgacaatttggttactctggaaacattggtttatgaagccaggtgtgatgtaactctaaccctgaaagaactccagcagatgaaagacattgaaaaactaagattactgatgaatagttgttctgaggataaatatgtgacaagtgcctaccagtggatggttccctttcttcatcgttgtgagaaacagtcgcctggtgtggctaatgagctattaaaagaatatttagtaactttagctaaaggggacttaaaatttcccctgaagatatttcagcattccaaaccagatctgcagcaaaaaattattcctgatcaggaccaactgatggcaatagcactagagtgcatctatacctgtgaacgaaatgatcaactctgtctttgctatgacctactagaatgtctgccagaaagaggatatggtgataagacagaggcaaccacaaagcttcatgacatggtagaccaactggaacaaattctcagtgtgtcagagcttttggaaaaacatggactcgagaaaccaatttcatttgttaaaaacactcaatctagctcagaagaggcacgcaagctgatggttagattgacgaggcacactggccggaagcagcctcctgtcagtgagtctcattggagaacgttgctgcaagacatgttaactatgcagcagaatgtatacacatgtctagattctgatgcctgctatgagatatttacagaaagccttctgtgctctagtcgccttgaaaacatccacctggctggacagatgatgcactgcagtgcttgttcagaaaatcctccagctggtatagcccataaagggaaaccccactacagggtcagctacgaaaagagtattgacttggttttggctgccagcagagagtacttcaattcttctaccaacctcactgatagctgcatggatctagccaggtgctgcttacaactgataacagacagaccccctgccattcaagaggagctagatcttatccaagccgttggatgtcttgaagaatttggggtaaagatcctgcctttgcaagtgcgattgtgccctgatcggatcagtctcatcaaggagtgtatttcccagtcccccacatgctataaacaatccaccaagcttctgggccttgctgagctgctgagggttgcaggtgagaacccagaagaaaggcggggacaggttctaatccttttagtggagcaggcacttcgcttccatgactacaaagcagccagtatgcattgtcaggagctgatggccacaggttatcctaaaagttgggatgtttgtagccagttaggacaatcagaaggttaccaggacttggccactcgtcaagagctcatggcttttgctttgacacattgccctcctagcagcattgaacttcttttggcagctagcagctctctgcagacagaaattctttatcaaagagtgaatttccagatccatcatgaaggaggggaaaatatcagtgcttcaccattaactagtaaagcagtacaagaggatgaagtaggtgttccaggtagcaattcagctgacctattgcgctggaccactgctaccaccatgaaagtcctttccaacaccacaaccaccaccaaagcggtgctgcaggccgtcagtgatgggcagtggtggaagaagtctttaacttaccttcgaccccttcaggggcaaaaatgtggtggtgcatatcaaatcggaactacagccaatgaagatctagagaaacaagggtgtcatcctttttatgaatctgtcatctcaaatccttttgtcgctgagtctgaagggacctatgacacctatcagcatgttccagtggaaagctttgcagaagtattgctgagaactggaaaattggcagaggctaaaaataaaggagaagtatttccaacaactgaagttctcttgcaactagcaagtgaagccttgccaaatgacatgaccttggctcttgcttaccttcttgccttaccacaagtgttagatgctaaccggtgctttgaaaagcagtccccctctgcattatctctccagctggcagcgtattactatagcctccagatctatgcccgattggccccatgtttcagggacaagtgccatcctctttacagggctgatcccaaagaactaatcaagatggtcaccaggcatgtgactcgacatgagcacgaagcctggcctgaagaccttatttcactgaccaagcagttacactgctacaatgaacgtctcctggatttcactcaggcgcagatccttcagggccttcggaagggtgtggacgtgcagcggtttactgcagatgaccagtataaaagggaaactatccttggtctggcagaaactctagaggaaagcgtctacagcattgctatttctctggcacaacgttacagtgtctcccgctgggaagtttttatgacccatttggagttcctcttcacggacagtggtttgtccacactagaaattgaaaatagagcccaagaccttcatctctttgagactttgaagactgatccagaagcctttcaccagcacatggtcaagtatatttaccctactattggtggctttgatcacgaaaggctgcagtattatttcactcttctggaaaactgtggctgtgcagatttggggaactgtgccattaaaccagaaacccacattcgactgctgaagaagtttaaggttgttgcatcaggtcttaattacaaaaagctgacagatgaaaacatgagtcctcttgaagcattggagccagttctttcaagtcaaaatatcttgtctatttccaaacttgttcccaaaatccctgaaaaggatggacagatgctttccccaagctctctgtacaccatctggttacagaagttgttctggactggagaccctcatctcattaaacaagtcccaggctcttcaccggagtggcttcatgcctatgatgtctgcatgaagtactttgatcgtctccacccaggtgacctcatcactgtggtagatgcagttacattttctccaaaagctgtgaccaagctgtctgtggaagcccgtaaagagatgactagaaaggctattaagacagtcaaacattttattgagaagccaaggaaaagaaactcagaagacgaagctcaagaagctaaggattctaaagttacctatgcagatactttgaatcatctggagaaatcacttgcccacctggaaaccctgagccacagcttcatcctttctctgaagaatagtgagcaggaaacactgcaaaaatacagtcacctctatgatctgtcccgatcagaaaaagagaaacttcatgatgaagctgtggctatttgtttagatggtcagcctctagcaatgattcagcagctgctagaggtggcagttggccctcttgacatctcacccaaggatatagtgcagagtgcaatcatgaaaataatttctgcattgagtggtggcagtgctgaccttggtgggccaagggacccactgaaggtcctggaaggtgttgttgcagcagtccacgccagtgtggacaagggtgaggagctggtttcacctgaggacctgctggagtggctgcggcctttctgtgctgatgacgcctggccggtgcggccccgcattcacgtgctgcagattttggggcaatcatttcacctgactgaggaggacagcaagctcctcgtgttctttagaactgaagccattctcaaagcctcctggccccagagacaggtagacatagctgacattgagaatgaagagaaccgctactgtctattcatggaactcctggaatctagtcaccacgaggctgaatttcagcacttggttttacttttgcaagcttggccacctatgaaaagtgaatatgtcataaccaataatccatgggtgagactagctacagtgatgctaaccagatgtacgatggagaacaaggaaggattggggaatgaagttttgaaaatgtgtcgctctttgtataacaccaagcagatgctgcctgcagagggtgtgaaggagctgtgtctgctgctgcttaaccagtccctcctgcttccatctctgaaacttctcctcgagagccgagatgagcatctgcacgagatggcactggagcaaatcacggcagtcactacggtgaatgattccaattgtgaccaagaacttctttccctgctcctggatgccaagctgctggtgaagtgtgtctccactcccttctatccacgtattgttgaccacctcttggctagcctccagcaagggcgctgggatgcagaggagctgggcagacacctgcgggaggccggccatgaagccgaagccgggtctctccttctggccgtgagggggactcaccaggccttcagaaccttcagtacagccctccgcgcagcacagcactgggtgtgagggccacctgtggccctgctccttagcagaaaaagcatctggagttgaatgctgttcccagaagcaacatgtgtatctgccgattgttctccatggttccaacaaattgcaaataaaactgtatggaaacgatgagcaagtaaaaaaaaaaaaaatt

SEQ ID NO: 698 - DNA, 1549 bp, Homo sapiens
gctttttttttttttttcctaagccgtggtcaccccagcctatgaagctggaagctatattccttccaatcccaatttaccattcctgtaaacaggcccattcagggctgcctgagcaaatggggacttgccgaggcagctgcaactagacttgggctaagccgtctgggtctactcaagaattcgagtctgaagatgaccaagcttgagttattcaactgagagtgaggtgtcaaggcggaagcgactgtccccagggaagggctgtgagatggatgggcgtgagtcagcttttccaaaactcaagtacctgggacaggacaactcgctagcagctcagtcacctccgtggcggacacagataaggatgttaagaccagaaaaccagagactagggccccgtcctcagccctcacagcatgacacagatgcctccctcggagagcagggtctctcggcatccagcggcgtggtctgcattctgctctacctcatgctctaggccccatgccatcgtctcggccctagaccgtgaaaactgccagtcacccgggacctgctcctaggggctggcctgcacagccggatggcctgtgggcggggtggaagtgcccactcccactccagatgggcctgctggccactgacccacctgtgctgagggagagcgccagcctccagcttaggtacacggcgcccacccccagctccacgggaaacccataaccaccagaaacatctcaatcaagagacgggtgtgtggggtggcactaactgcacagagaccactccacgccggctgaggtagaaagaaggcaactgaacacacagcagctagggcaggggcagggaggggctgcaggtggtgtgaagaagagcccagctgtcatctaaggcaaactgcccccactgaggacaagcgtaaggccctacctcccccaacctgtgcgcatctcaatcacagcagacactgtgacggccacaggggacccagatggtgcctaccaccttgcctccaggctccactcaccagacctcaggctgagggtctggcagtggaggtaggggcagggacccttggtgctttcagaccccacggcaggtaaaatcaggactgcctgagaacccgtcaccctctgcctctcaggtcaccccccagctccaggaacctgcctcctgctgtccattgccaggtcttccttgcaccctgacacctgtgctgaggcgctctggcagctggaggaggctgattgcactccacaaacaggactgtctggaccaagggaaactggcaggagggaggtgggaaaggaagagggcaaacgtttggcttttataaagtcaaggacgtttatttcctgaggtcatgacacaggaagtggaatcctagccacggctgcggagctctcgtgatgaaggccagagtgctgactgacatgccgggtggaccaggagctggagtctgttatcttagcacgaatgctcatgaccttggtttagtgttaaacagtggagcaggtcctgagcgggcacggccaggcctggagga

SEQ ID NO: 699 - DNA, 409 bp, Homo sapiens
gtatttttgtagagatggagtttcaccatgttggcaagactggtctcgaactcctgacctcaagtgatccacccgcctcggcctcccaaagtgctgagattacaggcatgggcccccactcccagccaagtaaagtttgaagtgaacacttgtatacccacagcctacagtccaccacccacctttgtctatacttgttttattccacatccgtccatccctctatctatccagcaatccatcagcattcatttccaattgcagctggaaataattcccacaaactgtgggacttcatacgacacaaatttctttctttttttttttattttttgagacagagtcttgctctgtcgcccaggctggagtgcagtggcgtgatctcggctcactgcaagctctgccttcc

SEQ ID NO: 700 - DNA, 423 bp, Homo sapiens
ctgcagctgcctgaaggagccatctcatccacagctcttccttgagcagccatggccagctccaggcgaggcctcctgctcctgctgctgctgactgcccaccttggaccctcagaggctcagcactggtcccatggctggtaccctggaggaaagcgagccctcagctcagcccaggatccccagaatgcccttaggcccccaggaagggccctggacactgcagcaggcagcccagtccagactgcccatggcctcccaagtgatgccctggctcccctggacgacagcatgccctgggagggcaggaccacggcccagtggtcccttcacaggaagcgacacctggcacggacactgctgaccgcagcccgagagccccgccccgccccgccatcctccaataaagtgtgaggttctccg

SEQ ID NO: 701 - DNA, 1772 bp, Homo sapiens
cagttgctaacatatctggttgtttccccattaataatgctaagattgacacctggatttagggggccatcatatttatttaaaattccttcaataattcaagcttattcaagctgcgagacttgcttaaagataagtgaaatatctaatcacaagggaagtctgttttcaaactatataaacaataacaggagtcataacagttgttttcttagaactgaatacctaacaattctgcagctctttcctcggtattttattataagcagattatatcttaattgttcccctttgttttcaaaggtttttctcttctttgcgtgaatcagtttatataaaaacatatatattcttattttcagaggtattctgctctgaagaacggttttactttataaggcatcagttccctctaatattagaaccttacaaagccacagcactttatatgttgcaaagcaccctctccatgaaaattggttctagttgatgcaacagacaaaacccgcaaatcacagtggcttaacactacagagagttatttcttgctcatgctagatttgatgtagctctcctgttggcatcactcttttctgagtagtgactcctggtcatgggctgtttctattatgtagctacactgattgctacacggggcttccatgccatgatgaagtgagaaaagagagcctcaggattcattagggtgttttcaggcttacatccctgacagccataccccaggcatgtgattctacggagaggctggaaaacgtagagtagctcatgatttcagtgagcactccagtctctgccacacctgcctttgtcatgttagcttatactttcctatcatcaaggatgatccatagaaggcaaagggttgaaaaggttgaacttcaccaatgcattatttcttccatttttgtgtttttatttttagaaaatcatgtgtgctctaacattgtagagcagcctttttcccttgacctcttcagcttgaccccttgctcctcctttttatatctgagatagtttatcttggtaattcatatcttgtctgttttcatagtgtattcctttctgcatatatagagaaatatgctgatgtacctatagcgggagttgtcttcataatggctgttcataaagataaagtcatgtttacatgtattcagctttgtctttctagttagtattaaattgtcctcaagctaaactttttgtcttgtttaaagttacatttggctgggcgtggtggctcatgccttggcctccctaaatgctgggattacaggcttgaggcaccatgcctggcctaaagtgtcagtaattctgatttcggttttctcttttagaagttttgatttccacagacttacaaagctaaggaagttttatgtccttgctctggctacactgcagtgttactgaatatcacctgcacaacctttactgcttgcagttttttttttcctgttgctttgtacatgatccgttattcaaatggccttataggcattcaataaaggtgaaatgttaaatacaaaatcacttgtctattaaattttattcaaggttctatataagatctgataaatggaactttgtgatggaaatgttttatatggtagccactagtcacatatagctattgaacctttgaatcatggctagttttagagttttatattttaatttaaattaaatagacgtgtctagtggcaccatattgtacaatgcagttctcattcaataaatcttaagtactt

SEQ ID NO: 702 - DNA, 2825 bp, Homo sapiens
gcgaaattgaggtttcttggtattgcgcgtttctcttccttgctgactctccgaatggccatggactcgtcgcttcaggcccgcctgtttcccggtctcgctatcaagatccaacgcagtaatggtttaattcacagtgccaatgtaaggactgtgaacttggagaaatcctgtgtttcagtggaatgggcagaaggaggtgccacaaagggcaaagagattgattttgatgatgtggctgcaataaacccagaactcttacagcttcttcccttacatccgaaggacaatctgcccttgcaggaaaatgtaacaatccagaaacaaaaacggagatccgtcaactccaaaattcctgctccaaaagaaagtcttcgaagccgctccactcgcatgtccactgtctcagagcttcgcatcacggctcaggagaatgacatggaggtggagctgcctgcagctgcaaactcccgcaagcagttttcagttcctcctgcccccactaggccttcctgccctgcagtggctgaaataccattgaggatggtcagcgaggagatggaagagcaagtccattccatccgtggcagctcttctgcaaaccctgtgaactcagttcggaggaaatcatgtcttgtgaaggaagtggaaaaaatgaagaacaagcgagaagagaagaaggcccagaactctgaaatgagaatgaagagagctcaggagtatgacagtagttttccaaactgggaatttgcccgaatgattaaagaatttcgggctactttggaatgtcatccacttactatgactgatcctatcgaagagcacagaatatgtgtctgtgttaggaaacgcccactgaataagcaagaattggccaagaaagaaattgatgtgatttccattcctagcaagtgtctcctcttggtacatgaacccaagttgaaagtggacttaacaaagtatctggagaaccaagcattctgctttgactttgcatttgatgaaacagcttcgaatgaagttgtctacaggttcacagcaaggccactggtacagacaatctttgaaggtggaaaagcaacttgttttgcatatggccagacaggaagtggcaagacacatactatgggcggagacctctctgggaaagcccagaatgcatccaaagggatctatgccatggcctcccgggacgtcttcctcctgaagaatcaaccctgctaccggaagttgggcctggaagtctatgtgacattcttcgagatctacaatgggaagctgtttgacctgctcaacaagaaggccaagctgcgcgtgctggaggacggcaagcaacaggtgcaagtggtggggctgcaggagcatctggttaactctgctgatgatgtcatcaagatgctcgacatgggcagcgcctgcagaacctctgggcagacatttgccaactccaattcctcccgctcccacgcgtgcttccaaattattcttcgagctaaagggagaatgcatggcaagttctctttggtagatctggcagggaatgagcgaggcgcagacacttccagtgctgaccggcagacccgcatggagggcgcagaaatcaacaagagtctcttagccctgaaggagtgcatcagggccctgggacagaacaaggctcacaccccgttccgtgagagcaagctgacacaggtgctgagggactccttcattggggagaactctaggacttgcatgattgccacgatctcaccaggcataagctcctgtgaatatactttaaacaccctgagatatgcagacagggtcaaggagctgagcccccacagtgggcccagtggagagcagttgattcaaatggaaacagaagagatggaagcctgctctaacggggcgctgattccaggcaatttatccaaggaagaggaggaactgtcttcccagatgtccagctttaacgaagccatgactcagatcagggagctggaggagaaggctatggaagagctcaaggagatcatacagcaaggaccagactggcttgagctctctgagatgaccgagcagccagactatgacctggagacctttgtgaacaaagcggaatctgctctggcccagcaagccaagcatttctcagccctgcgagatgtcatcaaggccttacgcctggccatgcagctggaagagcaggctagcagacaaataagcagcaagaaacggccccagtgacgactgcaaataaaaatctgtttggtttgacacccagcctcttccctggccctccccagagaactttgggtacctggtgggtctaggcagggtctgagctgggacaggttctggtaaatgccaagtatgggggcatctgggcccagggcagctggggagggggtcagagtgacatgggacactccttttctgttcctcagttgtcgccctcacgagaggaaggagctcttagttacccttttgtgttgcccttctttccatcaaggggaatgttctcagcatagagctttctccgcagcatcctgcctgcgtggactggctgctaatggagagctccctggggttgtcctggctctggggagagagacggagcctttagtacagctatctgctggctctaaaccttctacgcctttgggccgagcactgaatgtcttgtactttaaaaaaatgtttctgagacctctttctactttactgtctccctagagtcctagaggatccctactgttttctgttttatgtgtttatacattgtatgtaacaataaagagaaaaaataaaaaaaaaaaaaaaaaaaaaaaaaaaaaaaa

SEQ ID NO: 703 - DNA, 2347 bp, Homo sapiens
gggaggtttggagccctgcataaagagaaggacgggaccacagctgactgctgtgtccccacagatctgggcctcctgctgccaccatggccaaaggtggagaagccctgccacagggcagcccagcaccagtccaggatccccacctcatcaaggtgacagtgaagacgcccaaagacaaggaggatttctcagttacagacacatgcactatccagcagctgaaggaagagatatctcagcgctttaaggcccaccccgatcagcttgttctaatctttgctggcaaaatcctcaaggatcctgactcactggcacagtgtggagtgcgagatggcctcactgtccacctggtcatcaagaggcagcaccgtgccatgggcaatgagtgcccagctgcctctgtccctacccagggcccaagtcctggatcactccctcagccaagctccatttacccagcagatgggccccctgcctttagcttaggtctcctcacaggcctcagtaggctgggcttggcctatcgtggcttccctgaccagccaagctccctgatgcggcagcatgtgtctgtgcctgagtttgtgactcagctcattgatgaccccttcatcccgggtctgctgtccaacacaggcctagtacgccagctggttcttgacaacccccatatgcagcagctgatccagcacaaccctgagattgggcatattcttaacaacccggaaattatgcggcagacactggagtttttacgtaaccctgccatgatgcaggagatgatacgtagccaggaccgggtgctcagtaacttggagagcattcctggtggctacaatgtgctttgcactatgtacacagatattatggacccaatgcttaacgcagtccaggagcagtttggcggcaatccctttgccactgccactactgataatgccaccaccaccaccagccaaccttcaaggatggagaattgtgaccctctccccaacccctggacttccacacatggaggctcaggtagcaggcaaggaaggcaggatggggatcaggatgcacctgacattagaaataggtttccaaactttctgggtattataaggctctatgactatctccagcaattacacgagaacccccagtccctaggaacttatctacaggggactgcatctgccctcagccaaagccaggaaccaccaccatcagtaaacagagttcccccatcgtcaccctcatctcaggagcctgggtcaggccagcctctccccgaggagtcagtagcaatcaagggaaggtcctcctgcccagctttcctgagataccccacagagaacagtactggacaaggtggagaccaagatggtgcagggaaaagctctactggacatagcacaaacttgcctgatcttgtctcggggctgggagattctgccaacagggttccatttgctcccttatctttttcccccacggcagccattcctggaatccctgagcctccctggctgccatccccggcttatccaagatctctgaggccagatggcatgaatccagctccacagttacaggatgagatacaaccacagctgccactgctgatgcaccttcaggcagccatggcaaacccccgtgccctgcaagccctgcggcagattgagcagggtctacaggtcctagctactgaagcacctcgcctcctactctggttcatgccttgcctagcagggacgggtagtgtggcaggaggtatagagtctagagaagatccccttatgtctgaggatcctctcccaaatccacctcctgaggtgttcccagcactggactctgcagagctgggcttcctttcccctccctttctccatatgctgcaagatttagttagtacaaatccccagcagctgcagcctgaggctcactttcaggtgcagctggagcaactgcggtccatgggctttctgaatcgtgaagccaatcttcaggccctcattgctacggggggcgacgtggatgctgctgtggagaagctgagacagtcgtaggagccttattcattcaaaccatacgttttcctctgtgcctttttcccatatcctagttccctagctctcccatttttgaatacagctgcattataaaccaaatttactatgaagtcctttgctgtggaggcaatgttgttccagagtcaacgaggaagactaatggccaaaacatagtggaggtgctgtgtgtgagtcaaccacttgtaccactataccactggggggccccagtctaagctctgcttatgcctatcttgagatgcaattacacccaatttccaatgtgaaaa

SEQ ID NO: 704 - DNA, 1406 bp, Homo sapiens
aatgctgctctggtttcttgcgcgcttggcgctacagggagtgcgggcggcgactccttgcgcaagtcagcttgcctgggaaagggctttgtggctgaaagcgactggttccttgccacaaaggctccgctggcgtttgcggttcagcggccgtccctgagtaagatagccacttttctccgacgctgccaatagccttctccaagtgctgcaggctttcatcgctttgcaggagccatgcctcggggacggaagagtcggcgccgccggaacgcaaaggcagctgaagagaatcgcaacaatcgcaagagccaggcctcagaggcttcagagaccccgatggcggcttctgtagccccgagcacacccgaagaatacctgagcggcccggaggaagacacaagcaccctggagaaggcctccagtaccccttcagaagcttcgagcactgccctagtgcaaaagccggttacccggagcaattttcagggcaccaagaaaagtctcctaatgtccatattagccctcatcttcatcatgggcaacagcgcaaaggaggccctggtgtggaaagtgctggggaagttagggatgcagcctgggaggcagcacagcatctttggagatccgaagaaggtcgttacagaagagtttgtgcgcagagggtatctgatttataagccagtgccccgcagcagtccagtggagtatgagttcttctggggccctcgagcacacgtggaatctagcaagctgaaagtcatgcattttgtggcaagagttcggaaccgatgctccaaagactggccatgtaactatgactgggattcagatgatgatgcagaggttgaggctattctcaattcgggtgctaggggttattctgctccatagagagatcctaggcaaacccttaggagtggaaaagagaatccaaagtatctgctccatggagtagataggcagggtcctgaattcaaaaggttgtggagggtggggagggcactgtatttggtatttgtgaccagtgctaattgttaaactgcaaagtagtgtttgctatagatattgttatcttgtattcattttataacactgttgactaagaatcacaatatgtttaaatatatacttgaggaaaagtttatgttatttttttctgtcgttggcatttgatattaacagctgtgctaaccttattaaatgaagtctttgtgtcatgttgtgtgatggatagaaagtaccactgagaggctgttctttgaaagtttggaataaccagtaaagtgtgagtggaagaagattacagatttgttctgtctttcccttgtgtctgatgtcttgtaatggaacacatttgtaaatatgctcactgtgcaaatagtataaataaaagcatagtaaac

SEQ ID NO: 705 - DNA, 467 bp, Homo sapiens
cggcacgagttttttttttttttttgagatggagtctcgatctgtcacccaggctggagtgcagtggcgtggtctcagctcactgcaacctccgcctcctgggttcaagcaattcccctgcctcagcctcccgagtagctgggattacaggtgcctgccaccacgccaggctaattttttgtgtttttagtagagatgggtttcaccatgttggctaggctggtcttgaacttctgaccttgtgatctgcccgcctcggcctcccaaagtgttgggattgcaggcgtgagccaccgcgctggcaaatacgtactacattttaacaccagttttattattacacacaccgataaaaaggcctgggtatacaatcacataatcatgggtgtggaacatattttcttgcttctaagaaaaagaatagaaaaggttaaaacctggggggaaaaaaatccaggtcacttatt

SEQ ID NO: 706 - DNA, 945 bp, Homo sapiens
gcaggtaggtggacggagagatagcagcgacgaggacaggccaaacagtgacagccacgtagaggatctggcagacaaagagacaaggtgagaaggagactttggaagtgacccaccatggggctcagcatctttttgctcctgtgtgttcttgggctcagccaggcagccacaccgaagattttcaatggcactgagtgtgggcgtaactcacagccgtggcaggtggggctgtttgagggcaccagcctgcgctgcgggggtgtccttattgaccacaggtgggtcctcacagcggctcactgcagcggcagcaggtactgggtgcgcctgggggaacacagcctcagccagctcgactggaccgagcagatccggcacagcggcttctctgtgacccatcccggctacctgggagcctcgacgagccacgagcacgacctccggctgctgcggctgcgcctgcccgtccgcgtaaccagcagcgttcaacccctgcccctgcccaatgactgtgcaaccgctggcaccgagtgccacgtctcaggctggggcatcaccaaccacccacggaacccattcccggatctgctccagtgcctcaacctctccatcgtctcccatgccacctgccatggtgtgtatcccgggagaatcacgagcaacatggtgtgtgcaggcggcgtcccggggcaggatgcctgccagggtgattctgggggccccctggtgtgtgggggagtccttcaaggtctggtgtcctgggggtctgtggggccctgtggacaagatggcatccctggagtctacacctatatttgcaactccactcttgttggcctgggaacttcttggaactttaactcctgccagcccttctaagacccacgagcggggtgagagaagtgtgcaatagtctggaataaatataaatgaaggaggggc

SEQ ID NO: 707 - DNA, 4386 bp, Homo sapiens
gctgtgtgcgcaggcgcaagactagcgctcttgggaccggaagttaaggcgttcgcggcgtgtgaatccagggcctgaaaacccagaatgaacttgtgtccatcccagagatcactgcagatgtcatgaggtaccctttgtgtcaccagctcaagcaggcctctggccactttatcatctgtggtggtcctgtgccgtgaccaggaggaaaaattagctctttgaagagaaagtagttctctattgcaggcactggcctcttaaattgttgcaggtggggaatggatgagaatatttgttttgggtgatcagaactgagactcctattgtggattagtaacatgcctcctcctagaacaagggagggcagggatcgccgagaccaccaccgggctcccagcgaggaagaggccttggagaaatgggactggaattgtccagagacgcgtcgcctcttggaagatgccttcttccgtgaagaggattacatccgtcagggttctgaggaatgtcagaagttttggaccttctttgaacgcctgcagagattccagaatctcaagacctccaggaaggaggagaaagaccctggacagcccaagcacagcatcccagcgctggccgacctacctcgcacttacgacccacgttaccgcatcaacctctctgttcttggccctgccacgcggggctctcagggactgggcaggcacttgcccgcggagagagtggctgagttccgccgagccctgttgcactacctggactttggccagaagcaggcatttgggcgtctggccaagctgcagcgtgagcgggcagccctccccatcgcccagtatgggaaccgcatcctgcagacgctgaaggagcaccaggtggtggtagtggccggtgacaccggctgtggcaagtccactcaggtgccccagtacctgctggctgctggcttcagtcatgtggcgtgcacccagccccggcggatcgcctgcatctcactggccaagcgtgtgggctttgagagcctcagtcagtatggctcacaggtcggctaccagatccgctttgagagcacacgttcggcggccaccaagattgtattcctgacagtggggctgctcctgcgacaaatccagcgggaacccagcctgccccagtatgaggtcctgattgtggatgaagtccatgagcggcatctccacaacgatttcctcctgggcgtcctccagcgcctgttgcccacgcggcctgacctcaaggtcatcctcatgtcggccaccatcaacatctcgctcttctccagctatttcagcaatgcccctgtggtacaggtgcctgggaggctgttccccatcacggttgtgtaccagccgcaggaggcggagccgaccacgtccaagtcagagaagctggacccgcggcctttcctgagggtgctggagtccattgaccacaagtacccgcctgaggagcggggtgacctcctcgtcttcctcagcggcatggcggagatcagcgccgtgctggaggctgcccagacctatgccagccacacccagcgctgggtggtactgccactgcacagcgccctgtctgtggccgaccaggacaaggtatttgatgtggcaccccctggagtccggaaatgcatcctctccaccaacattgctgagacctcagtcaccattgacgggatccgcttcgtagtagattccggaaaggtgaaggagatgagctacgatccgcaggccaagctgcaacggctgcaggagttctggattagtcaggccagcgcagagcagcggaagggccgggcgggccgcacgggccccggagtctgcttccgcctctatgccgaatcggactatgatgccttcgccccctaccccgtcccagaaattcggagggtggccctggactcgttggtgctgcagatgaagagcatgagtgtgggggacccccgaaccttccccttcatcgagcccccaccaccagccagcctggaaaccgccatcctctacctccgggaccagggggccctggacagctcagaggccctcacacccattgggtccctgctagcccagctgcctgtggacgttgtgattgggaagatgctgatcctgggctccatgttcagcctggtggagcctgtgctcaccatcgcagccgcacttagcgtccagtcgcccttcacccgcagcgcccagagcagcccagagtgcgcggcagcacggcggccgctggagagcgaccagggtgaccccttcacgctcttcaacgtcttcaacgcctgggtgcaggtgaaatctgaacggagcagaaactctcgcaagtggtgccgccgccggggcatagaggagcatcgactgtacgaaatggccaaccttcggcgccagttcaaggagctgttggaggaccacgggctgctggctggggcccaggccgcgcaggtaggggacagctacagtcggttgcagcagcgccgggagcgccgggccctgcaccagctgaaacgccagcacgaggagggcgcggggcgcaggcgcaaggtgctgcggctgcaggaggagcaggacggcggctccagtgacgaggacagggctggcccagcccccccaggggccagtgatggcgtggacatccaggatgtgaagttcaagcttcggcatgacctggcgcagctgcaggccgctgccagctcagcccaggacctgagccgcgagcagctggctctgctgaagctggtgctgggccggggcctgtacccacagctggccgtccccgacgccttcaacagcagccgaaaggactcagaccagattttccacacgcaggccaagcagggcgccgtgctgcaccccacctgcgtcttcgctggcagccccgaggtgctgcacgcacaggagctggaggccagcaactgcgacggaagccgagacgacaaggacaagatgagcagcaaacaccagctcctcagcttcgtgtccctgctggagaccaacaagccgtacctggtgaactgcgtccgcatccctgccctccagtccctcctgctttttagccggtctttggacaccaatggtgactgctcccgcctggtggccgatggctggctggagctgcagctagcagacagtgaaagtgccatccgactcctggcggcttccctgcggctccgtgcccgctgggaaagtgccctggaccggcagctggcgcaccaggcccagcagcagctggaggaggaggaggaggatacgccagtcagccccaaggaggtggccaccctgagcaaggaactcctgcaattcacggcatccaagattccttacagcctccggcggctcacagggctagaagtccagaacatgtatgtgggaccccagaccatcccagccaccccccatcttcctggcctctttggcagctccaccctgtccccccaccccacaaaggggggctacgcagtcactgacttcctcacctacaactgcctcacgaatgacacagacctgtacagcgactgtctccgaaccttctggacctgcccccactgtggcctgcatgcgcccctcacgcccctggagcgcatcgcccatgagaacacctgcccccaggccccacaggatgggcccccaggggctgaggaagctgccctcgaaaccctccagaagacatctgtcctgcagaggccctaccactgcgaggcctgcgggaaggacttcctctttacacccacagaggtgctgcgccaccggaagcagcacgtgtgagctgggccaggagccctgcccacctccgtgcagctgacctgccctccagcccaggactaggggcaggactcttgcctgaacccccagcctgggcttagccctgtggtcctgtcccagtgcagagggcctggagcacggattgtgaataaagcctcacatgctgatacacactgttgttaggcctgcacctgcccatccagaaagcagcagctgccttgttagtcctccccagggtctagctttccttcttcctgctgcagggtgctgcctgaggggtcctgggtaggaggggcgttagagccagcagggacctcccatgtctccagattccaggtgcaggttcttagcacctccgcagccgctctctcttgagtccatcctcagtctctcctaccccttgaagtagggggaccctgaatttgcccatccacctgggtcactttgagagttgtgcaggggggctgggagcactggtgttcacgtgggaccacaggctgcaccataagacccactcacaataaaaaaataaaaggccgagccgggcatggttgctcactcccgtaataaaaaaataaaagaacaggctgagccgggaaaaaaaaaaaaaaaaaaa

SEQ ID NO: 708 - DNA, 2251 bp, Homo sapiens
agccttgggcaaccacacatagaggtttccttctcacttcagacacatacatcactttcacaccacttggggatggaaatacctacaagagtgaaggtcaagggccctccccaggcatctcattcattactcagcttccttcctgaccaagtctgccaaccaatggccagctatgcgcctcatcctcattgcttctgcctccacgtaaatgaaaccaaaggcctcagcatatcctgggaggactgggggctgttacctaatggtcctctctgtcccattataggtgcaaggcaccccatccacacatttgcaccactactccaagatagtatttttcttttcacacaatctctttacagcagaatccagagttgggttgtagtttaccttcctggaaagctcattatctttgtttgaattaacatttcagcatggaactaactgggcggaggaaggatcgttatacgtcttcagaaagttctcattgccccagctgcctagtactatacaagaagctctactttgatggcagatctaagaaggctataggcctttgtttgtaggaagcagtgtcattacattcaagcttcacttctctgattggcttccaaccactgggattcaaagagaatccaaggttctgcctatgtctgatgacataaggaaaacttggcttcctctgctcaaggttcccctctgctcatccctcctcattcagacatcctccaccataccagtgtttagaagcaaaacatgaagggctagcgccaccaggatagttagcagaaatattgtctgtaaagctaggcaggtgagcccagaagaatggtcccagagaaagcagactggctccaatagatatcaggcagcaatcccaataaattctgacatgtccttggcaatggaagcctgggttggagatcctgaggcagctgtgcctactgttccccacctcagaagcttcctgcccagagagccagcagccttgggatactaatgaggatgcaactggcttattggtatgaaatagaaggtggctttgtaggggcaagcaggcaaagagtactatccacatggcaggcaggtggctttgtgtctggaaagctttgcctagccagtacagctgtgagcagaggctggttataaatttgaactccctcagcccatttgcaactctgcctctgttcccttgcattctgtttggttgccctttagtttcctagtaaatgctccttttgaaaaactccaaccttgtcttatttaacttgggggaaggggattctccaatgtcttttccaggataaagaaggaaattaaaataccatgaaaaaatggacatggcagtagaaaggaaacattctgatcagaccttgggaaaagctggtgccgagagagggagaggccaggtgtccccccacccaactggcactgattctcagccccttcctcttacttctgttggcttcaaggagacctgcccttgatgtgtgttgctgctgaagcaccctcccagccagtgagttggacatatgcagcaggcactttgatgtccaggaagtacactggtacatgacaggagcaagggtcagggaggggaggggaaaggtttctacaatgcagatgttttcaaaattctccaacaatcatgactctaaatggtatgatttagggctgggtgcagtgactcacacctgtaatctcagcactttgggaggccaaggcgggaggatcacttgataccagaagttcaagaccagtctggcaacgtggagagaccaccatctaatttcaaaagagacccccccgcccccccggctaatttttaaaaaattagcaatgtacctgtagtcccagctacttaggaagctgagataggagaatcgcctgagtccaagagcttgaggctacagcgagccaagattgcaacactgcatttcagcctgggtgacagagcaaggccctgtctctctaaaaaagaaaaaaaaggtattgtttagttcacatggccatcagtagaactacatttcatatgatgagaagaaaataattatttattttacacttgagtcagggagactgacaaaggataggtatggaaaatggcttgctattttcatggccaccctgtcctgcaatgcggggggtgggaggggggacattccaatgacttactgctgcatgacaaagcaccaaaacatagtggcttaaatagaaatatattgtctctcatgaaaaaaaaaaaaaaaaaaaa

SEQ ID NO: 709 - DNA, 3177 bp, Homo sapiens
tgcaaacgttcccaaatcttcccagtcggcttgcagagactccttgctcccaggagataaccagaagctgcatcttattgacagatggtcatcacattggtgagctggagtcatcagattgtggggcccggagtgaggctgaagggagtggatcagagcactgcctgagagtcacctctactttcctgctaccgctgcctgtgagctgaaggggctgaaccatacactcctttttctacaaccagcttgcattttttctgcccacaatgagcggggaatcaatgaatttcagcgatgttttcgactccagtgaagattattttgtgtcagtcaatacttcatattactcagttgattctgagatgttactgtgctccttgcaggaggtcaggcagttctccaggctatttgtaccgattgcctactccttgatctgtgtctttggcctcctggggaatattctggtggtgatcacctttgctttttataagaaggccaggtctatgacagacgtctatctcttgaacatggccattgcagacatcctctttgttcttactctcccattctgggcagtgagtcatgccaccggtgcgtgggttttcagcaatgccacgtgcaagttgctaaaaggcatctatgccatcaactttaactgcgggatgctgctcctgacttgcattagcatggaccggtacatcgccattgtacaggcgactaagtcattccggctccgatccagaacactaccgcgcagcaaaatcatctgccttgttgtgtgggggctgtcagtcatcatctccagctcaacttttgtcttcaaccaaaaatacaacacccaaggcagcgatgtctgtgaacccaagtaccagactgtctcggagcccatcaggtggaagctgctgatgttggggcttgagctactctttggtttctttatccctttgatgttcatgatattttgttacacgttcattgtcaaaaccttggtgcaagctcagaattctaaaaggcacaaagccatccgtgtaatcatagctgtggtgcttgtgtttctggcttgtcagattcctcataacatggtcctgcttgtgacggctgcaaatttgggtaaaatgaaccgatcctgccagagcgaaaagctaattggctatacgaaaactgtcacagaagtcctggctttcctgcactgctgcctgaaccctgtgctctacgcttttattgggcagaagttcagaaactactttctgaagatcttgaaggacctgtggtgtgtgagaaggaagtacaagtcctcaggcttctcctgtgccgggaggtactcagaaaacatttctcggcagaccagtgagaccgcagataacgacaatgcgtcgtccttcactatgtgatagaaagctgagtctccctaaggcatgtgtgaaacatactcatagatgttatgcaaaaaaaagtctatggccaggtatgcatggaaaatgtgggaattaagcaaaatcaagcaagcctctctcctgcgggacttaacgtgctcatgggctgtgtgatctcttcagggtggggtggtctctgataggtagcattttccagcactttgcaaggaatgttttgtagctctagggtatatatccgcctggcatttcacaaaacagcctttgggaaatgctgaattaaagtgaattgttgacaaatgtaaacattttcagaaatattcatgaagcggtcacagatcacagtgtcttttggttacagcacaaaatgatggcagtggtttgaaaaactaaaacagaaaaaaaaatggaagccaacacatcactcattttaggcaaatgtttaaacatttttatctatcagaatgtttattgttgctggttataagcagcaggattggccggctagtgtttcctctcatttccctttgatacagtcaacaagcctgaccctgtaaaatggaggtggaaagacaagctcaagtgttcacaacctggaagtgcttcgggaagaaggggacaatggcagaacaggtgttggtgacaattgtcaccaattggataaagcagctcaggttgtagtgggccattaggaaactgtcggtttgctttgatttccctgggagctgttctctgtcgtgagtgtctcttgtctaaacgtccattaagctgagagtgctatgaagacaggatctagaataatcttgctcacagctgtgctctgagtgcctagcggagttccagcaaacaaaatggactcaagagagatttgattaatgaatcgtaatgaagttggggtttattgtacagtttaaaatgttagatgtttttaattttttaaataaatggaatactttttttttttttttaaagaaagcaactttactgagacaatgtagaaagaagttttgttccgtttctttaatgtggttgaagagcaatgtgtggctgaagacttttgttatgaggagctgcagattagctaggggacagctggaattatgctggcttctgataattattttaaaggggtctgaaatttgtgatggaatcagattttaacagctctcttcaatgacatagaaagttcatggaactcatgtttttaaagggctatgtaaatatatgaacattagaaaaatagcaacttgtgttacaaaaatacaaacacatgttaggaaggtactgtcatgggctaggcatggtggctcacacctgtaatcccagcattttgggaagctaagatgggtggatcacttgaggtcaggagtttgagaccagcctggccaacatggcgaaacccctctctactaaaaatacaaaaatttgccaggcgtggtggcgggtgcctgtaatcccagctacttgggaggctgaggcaagagaatcgcttgaacccaggaggcagaggttgcagtgagccgagatcgtgccattgcactccagcctgggtgacaaagcgagactccatctcaaaaaaaaaaaaaaaaaaaaaggaaagaactgtcatgtaaacataccgacatgtttaaacctgacaatggtgttatttgaaactttatattgttcttgtaagctttaactatatctctctttaaaatgcaaaataatgtcttaagattcaaagtctgtatttttaaagcatggctttggctttgcaaaataaaaaatgtgttttgtacatgaa

SEQ ID NO: 710 - DNA, 421 bp, Homo sapiens
cagtgagccgagatcgcgccactgcactccagcctgggcggcagagggagactttgtctcaaaaaaaaaaaaaaaaaaaagaaaaaaacagtttaccattctatcagaaaatgttgaccaccctcatatttttggtaaactgcagtaatttttccttaatactttttgcaagcttttgcatgcataagctccagtatcacacttaattttgcttgcttgctctctgaagggagttcggatgaccgttacagcaaagtggattttgcgtccaaagtgataagccaaatatcaggattttcccagtttctccgtaggactgatgtttagaggaaagccttccctgactcaaatatgtttctccatataaaaaggggaaagtaaaatgggttttctttctggtggtaaaaaaaaaaaaaaaaaa

SEQ ID NO: 711 - DNA, 15346 bp, Homo sapiens
gtctccgaggtctccgaccccgcccgcgcccagccctcccgcccagcccgcagccccctccctctgttccccgacctcagaccctgggcttccgacctcgacatcatgggtgacgcagaaggcgaagacgaggtccagttcctgcggacggacgatgaggtggtcctgcagtgcagcgctaccgtgctcaaggagcagctcaagctctgcctggccgccgagggcttcggcaaccgcctgtgcttcctggagcccactagcaacgcgcagaatgtgccccccgatctggccatctgttgcttcgtcctggagcagtccctgtctgtgcgagccctgcaggagatgctggctaacacggtggaggctggcgtggagtcatcccagggcgggggacacaggacgctcctgtatggccatgccatcctgctccggcatgcacacagccgcatgtatctgagctgcctcaccacctcccgctccatgactgacaagctggccttcgatgtgggactgcaggaggacgcaacaggagaggcttgctggtggaccatgcacccagcctccaagcagaggtctgaaggagaaaaggtccgcgttggggatgacatcatccttgtcagtgtctcctccgagcgctacctgcacctgtcgaccgccagtggggagctccaggttgacgcttccttcatgcagacactgtggaacatgaaccccatctgctcccgctgcgaagagggcttcgtgacgggaggtcacgtcctccgcctctttcatggacatatggatgagtgtctgaccatttcccctgctgacagtgatgaccagcgcagacttgtctactatgaggggggagctgtgtgcactcatgcccgctccctctggaggctggagccactgagaatcagctggagtgggagccacctgcgctggggccagccactccgagtccggcatgtcactaccgggcagtacctagcgctcaccgaggaccagggcctggtggtggttgacgccagcaaggctcacaccaaggctacctccttctgcttccgcatctccaaggagaagctggatgtggcccccaagcgggatgtggagggcatgggcccccctgagatcaagtacggggagtcactgtgcttcgtgcagcatgtggcctcaggactgtggctcacctatgccgctccagaccccaaggccctgcggctcggcgtgctcaagaagaaggccatgctgcaccaggagggccacatggacgacgcactgtcgctgacccgctgccagcaggaggagtcccaggccgcccgcatgatccacagcaccaatggcctatacaaccagttcatcaagagcctggacagcttcagcgggaagccacggggctcggggccacccgctggcacggcgctgcccatcgagggcgttatcctgagcctgcaggacctcatcatctacttcgagcctccctccgaggacttgcagcacgaggagaagcagagcaagctgcgaagcctgcgcaaccgccagagcctcttccaggaggaggggatgctctccatggtcctgaattgcatagaccgcctaaatgtctacaccactgctgcccactttgctgagtttgcaggggaggaggcagccgagtcctggaaagagattgtgaatcttctctatgaactcctagcttctctaatccgtggcaatcgtagcaactgtgccctcttctccacaaacttggactggctggtcagcaagctggatcggctggaggcctcatctggcatcctggaggtcctgtactgtgtcctcattgagagtccagaggttctgaacatcatccaggagaatcacatcaagtccatcatctccctcctggacaagcatgggaggaaccacaaggtcctggacgtgctatgctccctgtgtgtgtgtaatggtgtggctgtacgctccaaccaagatcttattactgagaacttgctgcctggccgtgagcttctgctgcagacaaacctcatcaactatgtcaccagcatccgccccaacatctttgtgggccgagcggaaggcaccacgcagtacagcaaatggtactttgaggtgatggtggacgaggtgactccatttctgacagctcaggccacccacttgcgggtgggctgggccctcaccgagggctacaccccctaccctggggccggcgagggctggggcggcaacggggtcggcgatgacctctattcctacggctttgatggactgcatctctggacaggacacgtggcacgcccagtgacttccccagggcagcacctcctggcccctgaagacgtgatcagctgctgcctggacctcagcgtgccgtccatctccttccgcatcaacggctgccctgtgcagggtgtctttgagtccttcaacctggacgggctcttcttccctgttgtcagcttctcggctggtgtcaaggtgcggttcctcctgggtggccgccatggtgaattcaagttcctgcccccacctggctatgctccatgccatgaggctgtgctccctcgagagcgactccatcttgaacccatcaaggagtatcgacgggaggggccccgggggcctcacctggtgggccccagtcgctgcctctcacacaccgacttcgtgccctgccctgtggacactgtccagattgtcctgccgccccatctggagcgcattcgggagaagctggcggagaacatccacgagctctgggcgctaacccgcatcgagcagggctggacctacggcccggttcgggatgacaacaagaggctgcacccgtgtcttgtggacttccacagccttccagagcctgagaggaactacaacctgcagatgtctggggagacgctcaagactctgctggctctgggctgccacgtgggcatggcggatgagaaggcggaggacaacctgaagaagacaaaactccccaagacgtatatgatgagcaatgggtacaagccggctccgctggacctgagccacgtgcggctgacgccggcgcagacaacactggtggaccgtctggcagaaaatgggcacaacgtgtgggcccgagaccgcgtgggccagggctggagctacagcgcagtgcaggacatcccagcgcgccgaaaccctcggctggtgccctaccgcctgctggatgaagccaccaagcgcagcaaccgggacagcctctgccaggccgtgcgcaccctcctgggctacggctacaacatcgagcctcctgaccaggagcccagtcaggtggagaaccagtctcgttgtgaccgggtgcgcatcttccgggcagagaaatcctatacagtgcagagcggccgctggtacttcgagtttgaagcagtcaccacaggcgagatgcgcgtgggctgggcgaggcccgagctgaggcctgatgtagagctgggagctgacgagctggcctatgtcttcaatgggcaccgcggccagcgctggcacttgggcagtgaaccatttgggcgcccctggcagccgggcgatgtcgttggctgtatgatcgacctcacagagaacaccattatcttcaccctcaatggcgaggtcctcatgtctgactcaggctccgaaacagccttccgggagattgagattggggacggcttcctgcccgtctgcagcttgggacctggccaggtgggtcatctgaacctgggccaggacgtgagctctctgaggttctttgccatctgtggcctccaggaaggcttcgagccatttgccatcaacatgcagcgcccagtcaccacctggttcagcaaaggcctgccccagtttgagccagtgccccttgaacaccctcactatgaggtatcccgagtggacggcactgtggacacgcccccctgcctgcgcctgacccaccgcacctggggctcccagaacagcctggtggagatgcttttcctgcggctgagcctcccagtccagttccaccagcacttccgctgcactgcaggggccaccccgctggcacctcctggcctgcagccccccgccgaggacgaggcccgggcggcggaacccgaccctgactacgaaaacctgcgccgctcagctgggggctggagcgaggcagagaacggcaaagaagggactgcgaaggagggcgcccccgggggcaccccgcaggcggggagaggcgcaccggccagggcggagaatgagaaggatgccaccaccgagaagaacaagaagagaggcttcttattcaaggccaagaaggtcgccatgatgacccagccaccggccacccccacgctgccccgactccctcacgacgtggtgcctgcagacaaccgcgatgaccccgagatcatcctcaacaccaccacgtactattactccgtgagggtctttgctggacaggagcccagctgcgtgtgggcgggctgggtcacccctgactaccatcagcacgacatgagcttcgacctcagcaaggtccgggtcgtgacggtgaccatgggggatgaacaaggcaacgtccacagcagcctcaagtgtagcaactgctacatggtgtggggcggagactttgtgagtcccgggcagcagggccggatcagccacacggaccttgtcattgggtgcctggtggacttggccactggcttaatgacctttacagccaatggcaaagagagcaacacctttttccaggtggaacccaacactaagctatttcctgccgtcttcgtcctgcccacccaccagaacgtcatccagtttgagctggggaagcagaagaacatcatgccgttgtcagccgccatgttccaaagcgagcgcaagaacccggccccgcagtgcccaccgcggctggagatgcagatgctgatgccagtgtcctggagccgcatgcccaaccacttcctgcaggtggagacgaggcgtgccggcgagcggctgggctgggccgtgcagtgccaggagccgctgaccatgatggcgctgcacatccccgaggagaaccggtgcatggacatcctggagctgtcggagcgcctggacctgcagcgcttccactcgcacaccctgcgcctctaccgcgctgtgtgcgccctgggcaacaatcgcgtggcgcacgctctgtgcagccacgtagaccaagctcagctgctgcacgccctggaggacgcgcacctgccaggcccactgcgcgcaggctactatgacctcctcatcagcatccacctcgaaagtgcctgccgcagccgccgctccatgctctctgaatacatcgtgcccctcacgcctgagacccgcgccatcacgctcttccctcctggaaggagcacagaaaatggtcacccccggcatggcctgccgggagttggagtcaccacttcgctgaggcccccgcatcatttctcgcccccctgtttcgtggccgctctgccagctgctggggcagcagaggccccggcccgcctcagccctgccatcccgctggaggccctgcgggacaaggcactgaggatgctgggggaggcggtgcgcgacggtgggcagcacgctcgcgaccccgtcggggcctccgtggagttccagtttgtgcctgtgctcaagctcgtgtccaccctgctggtgatgggcatctttggcgatgaggatgtgaaacagatcttgaagatgattgagcctgaggtcttcactgaggaagaagaggaggaggacgaggaggaagagggtgaagaggaagatgaggaggagaaggaggaggatgaggaggaaacagcacaggaaaaggaagatgaggaaaaagaggaagaggaggcagcagaaggggagaaagaagaaggcttggaggaagggctgctccagatgaagttgccagagtctgtgaagttacagatgtgccacctgctggagtatttctgtgaccaagagctgcagcaccgtgtggagtccctggcagcctttgcggagcgctatgtggacaagctccaggccaaccagcggagccgctatggcctcctcataaaagccttcagcatgaccgcagcagagactgcaagacgtacccgcgagttccgctccccaccccaggaacagatcaatatgctattgcaattcaaagatggtacagatgaggaagactgtcctctccctgaagagattcgacaggatttgcttgactttcatcaagacctgctggcacactgtggaattcagctagatggagaggaggaggaaccagaggaagagaccaccctgggcagccgcctcatgagcctgttggagaaagtgcggctggtgaagaagaaggaagagaaacctgaggaggagcggtcagcagaggagagcaaaccccggtccctgcaggagctggtgtcccacatggtggtgcgctgggcccaagaggacttcgtgcagagccccgagctggtgcgggccatgttcagcctcctgcaccggcagtacgacgggctgggtgagctgctgcgtgccctgccgcgggcgtacaccatctcaccgtcctccgtggaagacaccatgagcctgctcgagtgcctcggccagatccgctcgctgctcatcgtgcagatgggcccccaggaggagaacctcatgatccagagcatcgggaacatcatgaacaacaaagtcttctaccaacacccgaacctgatgagggcgctgggcatgcacgagacggtcatggaggtcatggtcaacgtcctcgggggcggcgagtccaaggagatccgcttccccaagatggtgacaagctgctgccgcttcctctgctatttctgccgaatcagccggcagaaccagcgctccatgtttgaccacctgagctacctgctggagaacagtggcatcggcctgggcatgcagggctccacgcccctggacgtggctgctgcctccgtcattgacaacaatgagctggccttggcattgcaggagcaggacctggaaaaggttgtgtcctacctggcaggctgtggcctccagagctgccccatgcttgtggccaaagggtacccagacattggctggaagccctgtggtggagagcgctacctggacttcctgcgctttgctgtcttcgtcaacggcgagagcgtggaggagaacgccaatgtggtggtgcggctgctcatccggaagcctgagtgcttcggacccgccctgcggggtgagggtggctcagggctgctggctgccatcgaagaggccatccgcatctccgaggaccctgcgagggatggcccaggcatccgcagggaccggcggcgcgagcactttggtgaggaaccgcctgaagaaaaccgggtgcacctgggacacgccatcatgtccttctatgccgccttgatcgacctgctcggacgctgtgcaccagagatgcatctaatccaagccggcaagggtgaggccctgcggatccgcgccatcctccgctcccttgtgcccttggaggaccttgtgggcatcatcagcctcccactgcagattcccaccctgggcaaagatggggctctggtgcagccaaagatgtcagcatccttcgtgccggaccacaaggcgtccatggtgctcttcctggaccgtgtgtatggcatcgagaaccaggacttcttgctgcacgtgctggacgtggggttcctgcccgacatgagggcagccgcctcgctggacacggccactttcagcaccaccgagatggcgctggccgtgaaccgctacctgtgcctggccgtgctgccgctcatcaccaagtgtgcgccgctctttgcgggcacagaacaccgcgccatcatggtggactctatgctgcataccgtgtaccgcctgtctcggggtcgttcgctcaccaaggcgcagcgtgacgtcatcgaggactgcctcatgtcgctctgcaggtacatccgcccgtcgatgctgcagcacctgttgcgccgcctggtgttcgacgtgcccatcctcaacgagttcgccaagatgccactcaagctcctcaccaaccactatgagcgctgttggaagtactactgcctacccacgggctgggccaacttcggggtcacctcagaggaggagctgcacctcacacggaaactcttctggggcatctttgactctctggcccataagaaatacgacccggagctgtaccgcatggccatgccttgtctgtgcgccattgccggggctctgccccccgactatgtggatgcctcatactcatctaaggcagagaaaaaggccacagtggatgctgaaggcaactttgatccccggcctgtggagaccctcaatgtgatcatcccggagaagctggactccttcattaacaagtttgcggagtacacacacgagaagtgggccttcgacaagatccagaacaactggtcctatggagagaacatagacgaggagctgaagacccaccccatgctgaggccctacaagaccttttcagagaaggacaaagagatttaccgctggcccatcaaggagtccctgaaggccatgattgcctgggaatggacgatagagaaggccagggagggtgaggaggagaagacggaaaagaaaaaaacggcgaagatatcacaaagtgcccagacctatgatcctcgagaaggctacaaccctcagccccccgaccttagtgctgttaccctgtcccgggagctgcaggccatggcagaacaactggcagaaaattaccacaacacgtggggacggaagaagaagcaggagctggaagccaaaggcggtgggacccaccccctgctggtcccctacgacacgctcacggccaaggagaaggcacgagatcgagagaaggcccaggagctactgaaattcctgcagatgaatggctacgcggttacaagaggccttaaggacatggaactggactcgtcttccattgaaaagcggtttgcctttggcttcctgcagcagctgctgcgctggatggacatttctcaggagttcattgcccacctggaggctgtggtcagcagtgggcgagtggaaaagtccccacatgaacaggagattaaattctttgccaagatcctgctccctttgatcaaccagtacttcaccaaccactgcctctatttcttgtccactccggctaaagtgctgggcagcggtggccacgcctctaacaaggagaaggaaatgatcaccagcctcttctgcaaacttgctgctctcgtccgccaccgagtctctctctttgggacagacgccccagctgtggtcaactgtcttcacatcctggcccgctccctggatgccaggacagtgatgaagtcaggccctgagatcgtgaaggctggcctccgctccttcttcgagagtgcctcggaggacatcgagaagatggtggagaacctgcggctgggcaaggtgtcgcaggcgcgcacccaggtgaaaggcgtgggccagaacctcacctacaccactgtggcactgctgccggtcctcaccaccctcttccagcacatcgcccagcaccagttcggagatgacgtcatcctggacgacgtccaggtctcttgctaccgaacgctgtgcagtatctactccctgggaaccaccaagaacacttatgtggaaaagcttcggccagccctcggggagtgcctggcccgtctggcagcagccatgccggtggcgttcctggagccgcagctgaacgagtacaacgcctgctccgtgtacaccaccaagtctccgcgggagcgggccatcctggggctccccaacagtgtggaggagatgtgtcccgacatcccggtgctggagcggctcatggcagacattggggggctggccgagtcaggtgcccgctacacagagatgccgcatgtcatcgagatcacgctgcccatgctatgcagctacctgccccgatggtgggagcgcgggcccgaggcacccccttccgccctgcccgccggcgcccccccaccctgcacagctgtcacctctgaccacctcaactccctgctggggaatatcctgagaatcatcgtcaacaacctgggcattgacgaggcctcctggatgaagcggctggctgtgttcgcacagcccattgtgagccgtgcacggccggagctcctgcagtcccacttcatcccaactatcgggcggctgcgcaagagggcagggaaggtggtgtccgaggaggagcagctggccctggaggccaaggcggaggcccaggagggcgagctgctggtgcgggacgagttctctgtgctctgccgggacctctacgccctgtatccgctgctcatccgctacgtggacaacaacagggcgcagtggctgacggagccgaatcccagcgcggaggagctgttcaggatggtgggcgagatcttcatctactggtccaagtcccacaacttcaagcgcgaggagcagaactttgtggtccagaatgagatcaacaacatgtccttcctgactgctgacaacaaaagcaaaatggctaagtccggtggctcggaccaggaacgcaccaagaagaagcgccggggggaccggtactctgtgcagacgtcactgatcgtggccacactgaagaagatgctgcccatcggcctgaatatgtgtgcgcccaccgaccaagacctcatcacgctggccaagacccgttacgccctgaaagacacagatgaggaggtccgggaatttctgcacaacaaccttcaccttcagggaaaggtcgaaggctccccgtctctgcgctggcagatggctctgtaccggggcgtcccgggtcgcgaggaggacgccgatgaccccgagaaaatcgtgcgcagagtccaggaagtgtcagccgtgctctactacctggaccagaccgagcacccttacaagtctaagaaggccgtgtggcacaagcttttgtccaaacagcgccggcgggcagtcgtggcctgtttccgtatgacgcccctgtacaacctgcccacgcaccgggcatgtaacatgttcctggagagctacaaggctgcatggatcctgactgaagaccacagttttgaggaccgcatgatagatgacctttcaaaagctggggagcaggaggaggaggaggaagaggtggaagagaagaagccagaccccctgcaccagttggtcctgcacttcagccgcactgccctgacggaaaagagcaaactggatgaggattacctgtacatggcctatgctgatatcatggcaaagagctgccacctggaggagggaggggagaacggtgaagctgaagaggaggttgaggtctcctttgaggagaaacagatggagaagcagaggctcttgtaccagcaagcacggctgcacacccggggggcggccgagatggtgctgcagatgatcagtgcctgcaaaggagagacaggtgccatggtgtcctccaccctgaagctgggcatctccatcctcaatggaggcaatgctgaggtccagcagaaaatgctggattatcttaaggacaagaaggaagttggcttcttccagagtatccaggcactgatgcaaacatgcagcgtcctggatctcaatgcctttgagagacagaacaaggccgaggggctgggcatggtgaatgaggatggcactgtcatcaatcgccagaacggagagaaggtcatggcggatgatgaattcacacaagacctgttccgattcctacaattgctctgtgaggggcacaataatgatttccagaactacctacggacacagacagggaacacgaccactattaacatcatcatttgcactgtggactacctcctgcggctgcaggaatccatcagcgacttctactggtactactcgggcaaggatgtcattgaagagcagggcaagaggaacttctccaaagccatgtcggtggctaagcaggtgttcaacagcctcactgagtacatccagggtccctgcaccgggaaccagcagagcctggcgcacagtcgcctatgggacgcagtggtgggattcctgcacgtgttcgcccacatgatgatgaagctcgctcaggactcaagccagatcgagctgctgaaggagctgctggatctgcagaaggacatggtggtgatgttgctgtcgctactagaagggaacgtggtgaacggcatgatcgcccggcagatggtggacatgctcgtggaatcctcatccaatgtggagatgatcctcaagttcttcgacatgttcctgaaactcaaggacattgtgggctctgaagccttccaggactacgtaacggatccccgtggcctcatctccaagaaggacttccagaaggccatggacagccagaagcagttcagcggtccagaaatccagttcctgctttcgtgctccgaagcggatgagaacgaaatgatcaactgcgaagagttcgccaaccgcttccaggagccagcacgcgacatcggcttcaacgtggcggtgctgctgaccaacctgtcggagcatgtgccgcatgaccctcgcctgcacaacttcctggagctggccgagagcatccttgagtacttccgcccctacctgggccgcatcgagatcatgggcgcgtcacgccgcatcgagcgcatctacttcgagatctcagagaccaaccgcgcccagtgggagatgccccaggtgaaggagtccaagcgccagttcatcttcgacgtggtgaacgagggcggcgaggctgagaagatggagctcttcgtgagtttctgcgaggacaccatcttcgagatgcagatcgccgcgcagatctcggagcccgagggcgagccggagaccgacgaggacgagggcgcgggcgcggcggaggcgggcgcggaaggcgcggaggagggcgcggcggggctcgagggcacggcggccacggcggcggcgggggcgacggcgcgggttgtggcggccgcaggccgggccctgcgaggcctcagctaccgcagcctgcggcggcgcgtgcggcggctgcggcggcttacggcccgcgaggcggccaccgcagtggcggcgctgctctgggcagcagtgacgcgcgctggggccgctggcgcgggggcggcggcgggcgcgctgggcctgctctggggctcgctgttcggcggcggcctggtggagggcgccaagaaggtgacggtgaccgagctcctggcaggcatgcccgaccccaccagcgacgaggtgcacggcgagcagccggccgggccgggcggagacgcagacggcgagggtgccagcgagggcgctggagacgccgcggagggcgctggagacgaggaggaggcggtgcacgaggccgggccgggcggtgccgacggggcggtggccgtgaccgatgggggccccttccggcccgaaggggctggcggtctcggggacatgggggacacgacgcctgcggaaccgcccacacccgagggctctcccatcctcaagaggaaattgggggtggatggagtggaggaggagctcccgccagagccagagcccgagccggaaccagagctggagccggagaaagccgatgccgagaatggggagaaggaagaagttcccgagcccacaccagagccccccaagaagcaagcacctccctcaccccctccaaagaaggaggaagctggaggcgaattctggggagaactggaggtgcagagggtgaagttcctgaactacctgtcccggaacttttacaccctgcggttccttgccctcttcttggcatttgccatcaacttcatcttgctgttttataaggtctcagactctccaccaggggaggacgacatggaaggctcagctgctggggatgtgtcaggtgcaggctctggtggcagctctggctggggcttgggggccggagaggaggcagagggcgatgaggatgagaacatggtgtactacttcctggaggaaagcacaggctacatggaacccgccctgcggtgtctgagcctcctgcatacactggtggcctttctctgcatcattggctataattgtctcaaggtgcccctggtaatctttaagcgggagaaggagctggcccggaagctggagtttgatggcctgtacatcacggagcagcctgaggacgatgacgtgaaggggcagtgggaccgactggtgctcaacacgccgtctttccctagcaactactgggacaagtttgtcaagcgcaaggtcctggacaaacatggggacatctacgggcgggagcggattgctgagctactgggcatggacctggccacactagagatcacagcccacaatgagcgcaagcccaacccgccgccagggctgctgacctggctcatgtccatcgatgtcaagtaccagatctggaagttcggggtcatcttcacagacaactccttcctgtacctgggctggtatatggtgatgtccctcttgggacactacaacaacttcttctttgctgcccatctcctggacatcgccatgggggtcaagacgctgcgcaccatcctgtcctctgtcacccacaatgggaaacagctggtgatgaccgtgggccttctggcggtggtcgtctacctgtacaccgtggtggccttcaacttcttccgcaagttctacaacaagagcgaggatgaggatgaacctgacatgaagtgtgatgacatgatgacgtgttacctgtttcacatgtacgtgggtgtccgggctggcggaggcattggggacgagatcgaggaccccgcgggtgacgaatacgagctctacagggtggtcttcgacatcaccttcttcttcttcgtcatcgtcatcctgttggccatcatccagggtctgatcatcgacgcttttggtgagctccgagaccaacaagagcaagtgaaggaggatatggagaccaagtgcttcatctgtggaatcggcagtgactactttgatacgacaccgcatggcttcgagactcacacgctggaggagcacaacctggccaattacatgtttttcctgatgtatttgataaacaaggatgagacagaacacacgggtcaggagtcttatgtctggaagatgtaccaagagagatgttgggatttcttcccagctggtgattgtttccgtaagcagtatgaggaccagcttagctgacacacccccagctggccctccacccccacctcaagtgccttattctcacagcaagccccttagtccccaagcccctccccctaaggcagctgggggagaggtgacctagtactggaaaataaatctgtcgtacgccccccag

SEQ ID NO: 712 - DNA, 2134 bp, Homo sapiens
ctttgaaaataattcggattttaacttctactgttctctccttcctttcattgcccactctcaagtactaattaaattttgtcttttctaccttataaaataaatatctcatccatcttttcaatagccacatcttcttcacaactcaccggaactgttgcagcagttgcctcctgcccatcccctcctccagcttccctgccaatcagtttgtaatcgacagtggtgatacccctcatcatggtgttgttctccagttgatattctcatctgggacccatcactggagccacagcatttttagaattaaaggctgaactttttagcatgacagtcacgaccatcataactgtcactcatttgtcattcagtcttatctctcacatctatgatttttacattccagatatcttacagtggccccagtatacctaccttcccctttatgctgtggctcacacaggtgtctctagctaaaaaaaaacaccttcctcttgttaacatagataactcctatgggtccttttcactctatcaatatcacctcctccagaatgtctgttgaaaccatgagactcagggaaacactttttctgctcccataaagttccatgattactccagatagaaatagtttactattgcattggaatgtctttttcctccaaagtgtatccctgggtcctaacatagtatttggacatgtggtaggaactcaagtagtatttgttcaataaagtttttcagtcaactattgtatcaatgccttaattctaagacatatcattgatctaaacatttcttcaataaaaaatagacttctgttcatgattgaaaaacttcacaactttataaacattaatatataaaagtataatttagaattgagaaatatggcaaccacttttcttaaggagacattctattttttttccaaccatgaaaactgggaaatgtccttaaataccattcttaaaagctgtgtttttgcatttaacagtctccataatttgaagtgaaatgtcattcatttggatgtcaaatggcaaaactatatcttttttaaaatttaagcgtatattatataaaataataacttcgtgaaaggtaattttacagaattaaaaccctgagtactcatcaaaaccatatcagtcattttatggatgagcaagcttgatctggaagggaggtgacattagtttctcaggcccacagagcttgttagtggtagaattagaaccagaacacaagattacctggcttattaccaaggaagcttgaataattaaaaacgtattttttaatactaggtgtttgggtgctgtcttcagcattgagttataatgatgatcaaattgggaaggcacccagccctgtggaagttcgtgcagtggagaagaggagataatggcatagcagtggagacacccaaagtcatccacagtttggctttaaatagcatttctaatatcattttctccctccctccatgatgaggtctaaatttcaaccatttgaactccttgctattcctggttcatttccatgcttattgcctctgagcctttgctcctgcttgccctgctggttcatgtctgctggttcatgtgtccttccctttggaagcacatccaaatcctacctgatgtctaagacctatctgaaaaggcagctcctctacagagactttcctagttctctctgtcagtagtaacttcttcctcccttgagtcccatacaacttttctttcccttgtttgtagcacttctctagttaagctttgtgttacagttattttctatctatccaaatttccttcatgatttttagtaaatcctgctgtgagttatttgctgcataatttaatgaaattactgtagagtcagcaaagaagtagagaagaaaaaacaccaagaatgaggagaacctagcaagggcaggcttttggaagcaagaggtagataatttaataaaaggatagttaatagtttcaaatgtgttatgactttttgctctgagtctctactttttgtagtttgtgttattctgatgtattatttaacctttgttccttatcacttttatttaaatataactttcaatttgttttcaaaaaaaaaaaaaaaaaaa

SEQ ID NO: 713 - DNA, 599 bp, Homo sapiens
attcggcatgaggtttgtggctcgccagcctacaaaagactttcatgtcctctattgggctgggaaaatcctgttcttcaagttatctttagtcatgctagaaaagaagcaaactgggaagagaaagacaagagaaattcataggggaaaaaaaattaaagaccagacttaaggttcctgtgagaaaaaaggaaactgaattataaatctgtcatatttagaaagactatgaaaatgatgttagataaaaattaaattcaagcaattttcttgttcgagttcaaaacgggtcataaagcagcagagataacttgcaacatcaacaatgcatttggcccaggaactgctaatgaacatacagtgcagtgcttgttcaagaagttttgcaaaggagaagaggaagatgaggagtgtagtgaccagccattagaagttgacaacaaccaagtgggagcaatcatcaaagctcatccttttacaactacacgagaaggtgccgaagagctcaccattgaccattctatggtcatttggcatttgaagcaaactggaaaggtgaaaaagctcgataagtggatgcctcatgagctgaaccaaaa

SEQ ID NO: 714 - DNA, 1696 bp, Homo sapiens
agaacagacgtttgaacagagcaggcttctgaggtctccaaaatgcctgtcccagcctcctggccccatcctcctggtcctttcctgcttctgactctactgctgggacttacagaagtggcaggtgaggaggagctacagatgattcagcctgagaagctcctgttggtcacagttggaaagacagccactctgcactgcactgtgacctccctgcttcccgtgggacccgtcctgtggttcagaggagttggaccaggccgagaattaatctacaatcaaaaagaaggccacttccccagggtaacaacagtttcagacctcacaaagagaaacaacatggacttttccatccgcatcagtagcatcaccccagcagatgtcggcacatactactgtgtgaagtttcgaaaagggagccctgagaacgtggagtttaagtctggaccaggcactgagatggctttgggtgccaaaccctctgcccccgtggtattgggccctgcggcgaggaccacacctgagcatacagtgagtttcacctgtgagtcccatggcttctctcccagagacatcaccctgaaatggttcaaaaatgggaatgagctctcagacttccagaccaacgtggaccccacaggacagagtgtggcctacagcatccgcagcacagccagggtggtactggacccctgggacgttcgctctcaggtcatctgcgaggtggcccatgtcaccttgcagggggaccctcttcgtgggactgccaacttgtctgaggccatccgagttccacccaccttggaggttactcaacagcccatgagggcggggaaccaggtaaacgtcacctgccaggtgaggaagttctacccccagagcctacagctgacctggttggagaatggaaacgtgtgccagagagaaacagcctcgacccttacagagaacaaggatggtacctacaactggacaagctggttcctggtgaacatatctgaccaaagggatgatgtggtcctcacctgccaggtgaagcatgatgggcagctggcggtcagcaaacgccttgccctggaggtcacagtccaccagaaggaccagagctcagatgctacccctggcccggcatcatctcttactgcgctgctcctcatagctgtcctcctgggccccatctatgtcccctggaagcagaagacctgactctccttccttcctcccctgccacgtgggaccctcatctctgctgcctccttcctttcctgagaggctcagcttgagagaatgagccagtgagaagcttctctagacttggctccaaacatctcccctcccaagacatctgcctgcccacaggctcctgttgctccttcacacagacctggatgccccagagcaaggtcttcattcatggtcctgagcaggggccatgggattgggctctgggcactgacttaacggcacctccctagaaggcgagaaacatgccaaatctaaacacaccaggactcccatccatcgccttgagactgaccgtaaaccacagacgctctccaggttctcaagagttatcctgccttccagattcctgcctatcccaactccccagccttgttgaggttctctattgcctcttgaatacaaatgcactcccaaagtggttttaagaaaataaaaagattatccttccaaa

SEQ ID NO: 715 - DNA, 1530 bp, Homo sapiens
gtgctctgcacccagctccttcccgggcgcgcacacgcgcttcctctcttgagctcccgggcgtccggaggcgaaggtcccggagcgttcacgagaatccgggtcccggcgagtccggggtccgctcctccagctgcgcccagggcgcacgagccggccagcctcggggagagggcgcgggggcgctgggggttcttacgggaagatgaggaagcccgacagcaagatcgtgctcctgggggacatgaacgtggggaagacgtcgctgctgcagcggtatatggagcggcgcttcccggacacggtcagcacggtgggcggcgccttctacctgaagcagtggcgctcctacaacatctccatctgggacaccgcagggcgggagcagttccacggcctgggatccatgtactgccggggggcggccgccatcatcctcacctatgatgtgaatcaccggcagagcctggtggagctggaggaccggttcctgggcctgacagacacagccagcaaagactgcctcttcgccatcgtggggaacaaagtggacctcactgaggagggggccttggcgggccaggagaaggaagagtgcagtcccaatatggacgctggggaccgtgtctccccaagggcacctaagcaggtgcagctggaggatgcggtggccctttataaaaagatcctcaagtacaagatgctggatgagcaggatgtgccggccgctgagcaaatgtgctttgagaccagcgccaagaccggctacaatgtggacctcctgtttgagaccctctttgacctggtggtgccaatgatcttacagcagagagctgagaggccgtcacacacagtggatatatccagtcataagccacccaagaggaccagatctgggtgttgtgcctgactttcgagggcctcctggactcagactgtgcatgttgggaaggggtctgaccaggcaagctgtgatctgaaaggagcaaggaacagcaaggaattattttccagaatgacacccgcagcagaatgttggagtggaaatgatggctggctatgaagaggaggtcaacgtgtgtggtctcctcagtctctgtcagaggggtggggaggtgggaaacaggaatcctctgcaaagcccaatctgcagagtcgagacccctggtgctctctgccccgctgcctggcactggtcctttgcagccagccaccaacggcccccttgcccttgcagaggcagaagcctgcgtctgcacctgcacctctgaccgtttcagcaccctgggttgttaccacgtcctacaactctgacatttcttgttctcaagcgtttctcttcactgtgagttgtctttggtcctcccacttggtacttgtatcttgatgctttataatcctgactctcgacgtgttcatttatacaaaatcaggaataactttgtttttatactgattgcagcaatgttggctacatgtattattaaagaggatttttggaacaacttaaaaaaaaaaaaaaaaaaaaaa

SEQ ID NO: 716 - DNA, 2884 bp, Homo sapiens
agtaacccctcggctttctgttcctggacggtggcggccgccggctctatgatggagcccccgaagcccgagcctgagctccagcggttttaccaccggctgctgcgtccgctgtcgctcttccccactaggacgacgtccccagagcctcagaagcgccccccgcaggagggccggattctgcagtccttccctctggcgaagctgacggtggcgtcgctgtgcagccaggtggccaagctgctggccggcagcgggatagcagcgggagtgcctcctgaggcccgactacgtctcatcaaggtcatcctggacgagctgaagtgcagctggcgggagccgcccgccgaacttagtctgagccacaaaaacaaccagaagctgcggaagcggctcgaggcctacgtgctgctgagcagcgagcagctcttcttgcgctacctgcacctgctggtgaccatgtcgactcccaggggggtcttcactgaatcagccaccctcacccggttggccgccagcctcgccagggactgcacactcttccttactagtcccaacgtctaccgtggcctgcttgccgacttccaggccctgctgagggcagagcaggcctctggggatgtggacaagctgcaccctgtctgccccgctgggacgttcaagctgtgccctatcccctggcctcacagcactggcttcgcccaagtgcagtgctctaacctcaacctgaactacctcatccaactcagccgtccaccagagtttctcaatgagccaggaaggatggatccagtgaaggaattgaagtccatccctcggttgaagaggaaaaagcctttccactggctgccctccataggaaagaagagagaaatcgacatcagttcctcacagatggtgtcgctgcccagctatcctgtggcccccaccagcagggcttccccctcgcctttctgccctgagctccggagaggccaatccatgccctccctgcgtgagggctggaggctggcagatgagttgggccttcctccactcccatctcgccccttaaccccgctggtcttggctacagagagcaaaccagagctgactgggctcatcgtggctgaggatctgaagcagttgataaagaagatgaagttggaggggactcgctacccaccactggactcaggcctgcctcctctcctgggggttgtgacccgtcacccagctgcagggcatcgcctggaggagctggagaagatgttgaggaacctccaggaggaagaagcctctgggcagtgggacccccagccccccaaatcctttccacttcacccacagccagtgaccattactttgaagcttagaaatgaggtcgtggtccaggcggctgccgtacgggtctctgatagaaacttcttagactctttccacattgagggggccggagccctgtataaccatctggctggtgaactggatcccaaagccattgaaaaaatggatattgataactttgttggcagtactaccagggaggtctacaaggagttgatgagccatgtctcttctgaccacttacattttgatcaagggcccctagttgagcctgcagcagataaagactggtcgaccttcctgtcctcagcctttctacgtcaagaaaaacagcctcaaatcatcaaccctgagctggttggactttactcccagagagcaaacactttacagtccaatactaagaagatgccctccctcccatcactccaagctaccaaaagctgggagaagtggtcaaacaaggcctccttgatgaactcatggaaaaccaccttgtctgtggatgactacttcaagtacctcaccaaccatgaaacagatttccttcatgtcatctttcaaatgcatgaagaagaggttcctgtggagattgtggcccctgccagagagtccctagagattcagcaccctcccccattgctagaagatgaagaaccagactttgtgccaggagagtgggattggaacactgtgctagagcacaggctaggagctgggaagacaccccacctgggagaaccccacaaaattctgagcctgcagaagcatctggaacaactgtggtctgtgcttgaggtccctgacaaggaccaggtggacatgaccattaaatatagctccaaagcccgcctgaggcagctgccttcattggtgaatgcctgggagcgggccctgaagcccattcagctgcgggaggcattgctggcgagacgagagtggtttgagggacaagcttccaatcccaaccgcttcttcaaaaagaccaacttgagctccagtcacttcctggaggagaatcaggtccgaagccatctccacaggaagctcaacttaatggagtcttctttggtttccctcctagaggagatagagttaatctttggcgagccagtgatcttcaaggggcggccctacctggacaagatgaagagtgacaaagtggagatgctctattggctgcaacagcagcggcgggttcgccacctggtctcggccctgagggatccccaccagtcaaccctgttcaggagctcagcagccagcctttagtagctcctgggaatacccctattactccttgaccaggcccagtgccctcaaatgcctccctcacccctaaatggccagcagctcatctagacctctttactgctttggaagaagaaatatttgtctatatctgggagtggagggttcaggaacattatgcttccaactatgaagggattgagactaaaactattgttttcttagtgaaattctcatgaaagaatccccaagcctagtagtcccattatgtcaagccttgcacaatacaagccaaatctcctatatc

SEQ ID NO: 717 - DNA, 2096 bp, Homo sapiens
ctcctctgctcctcgaagaaggccagggcggggctgccgcaagttttgacattttcgcagcggagacgcgcgcgggcactctcgggccgacggctgcggcggcggccgaccctccagagccccttagtcgcgccccggccctcccgctgcccggagtccggcggccacgaggcccagccgcgtcctcccgcgcttgctcgcccggcggccgcagccatgtcccgggggcccgaggaggtgaaccggctcacggagagcacctaccggaatgttatggaacagttcaatcctgggctgcgaaatttaataaacctggggaaaaattatgagaaagctgtaaacgctatgatcctggcaggaaaagcctactacgatggagtggccaagatcggtgagattgccactgggtcccccgtgtcaactgaactgggacatgtcctcatagagatttcaagtacccacaagaaactcaacgagagtcttgatgaaaattttaaaaaattccacaaagagattatccatgagctggagaagaagatagaacttgacgtgaaatatatgaacgcaactctaaaaagataccaaacagaacacaagaataaattagagtctttggagaaatcccaagctgagttgaagaagatcagaaggaaaagccaaggaagccgaaacgcactcaaatatgaacacaaagaaattgagtatgtggagaccgttacttctcgtcagagtgaaatccagaaattcattgcagatggttgcaaagaggctctgcttgaagagaagaggcgcttctgctttctggttgataagcactgtggctttgcaaaccacatacattattatcacttacagtctgcagaactactgaattccaagctgcctcggtggcaggagacctgtgttgatgccatcaaagtgccagagaaaatcatgaatatgatcgaagaaataaagaccccagcctctacccccgtgtctggaactcctcaggcttcacccatgatcgagagaagcaatgtggttaggaaagattacgacaccctttctaaatgctcaccaaagatgccccccgctccttcaggcagagcatataccagtcccttgatcgatatgtttaataacccagccacggctgccccgaattcacaaagggtaaataattcaacaggtacttccgaagatcccagtttacagcgatcagtttcggttgcaacgggactgaacatgatgaagaagcagaaagtgaagaccatcttcccgcacactgcgggctccaacaagaccttactcagctttgcacagggagatgtcatcacgctgctcatccccgaggagaaggatggctggctctatggagaacacgacgtgtccaaggcgaggggttggttcccgtcgtcgtacacgaagttgctggaagaaaatgagacagaagcagtgaccgtgcccacgccaagccccacaccagtgagaagcatcagcaccgtgaacttgtctgagaatagcagtgttgtcatccccccacccgactacttggaatgcttgtccatgggggcagctgccgacaggagagcagattcggccaggacgacatccacctttaaggccccagcgtccaagcccgagaccgcggctcctaacgatgccaacgggactgcaaagccgccttttctcagcggagaaaacccctttgccactgtgaaactccgcccgactgtgacgaatgatcgctcggcacccatcattcgatgagaggacagccaaggactctcccgggcctctccggttctcccttgcggaatgatgggcgcatcctgtctgccacgtgctgacggtcgggaagcttcagtggagaggcctaactctaatgtcgcctgcttaagcaaatcatgcttctctgtttcacgtagttgggttgacaagtttctgcctttaagataaatgagtaatagtctaatgaccagctcagccatttaaaatattttcttcctattctgttcaagaaacagtaaacttggtttcaatctttaaaaaaaaaaaaaaaaaaaaaaaaaaaaaaaaaaaaaaaaaaaaaaaaaaaaaaaaaaaaaaaaaaa

SEQ ID NO: 718 - DNA, 343 bp, Homo sapiens
tatttgctttcctctccactatcccatccgtatgagaaaaagagtgtgtgcactgatgataacaggatcttggatgataggctccatcaactcttgtgctcacacggtatatgcactccgtatcccatattgcaagtccagagccatcaatcattttttctgtgatgttccagctatgttgaccctagcctgcacggatacctgggtctatgagtgcacggtgtttttgagcaccaccatttttcttgtgtttcccttcatttgtattgcatgttcctatggccggattctccttgctgtctaccacatgcactctgcagaagggaggaagaaggcctattcg

SEQ ID NO: 719 - DNA, 2585 bp, Homo sapiens
gtggggtcggggggttggttgggtgcagtaccccgggcgttcactgcctgtgacaggagcagattgggggcgctatctggggctgtgctgcttgtggtccgggtggggggcgggtttgatggggcactatttggtgctgcaacacccgtggcagggatgggttgtggacactatcgagtgtccaccacgggtggtttgggggtgctatcagggtaacactgcctgcagcagtctctgggtgtgttgtgggcacaatctgggggctaagcttgtggggagggggggcaggttaggggtggtatggggggaggctgcactgctgctgccagcagcaggttgtggaggtggccatgacagtggtggcctctgaggaaggggcccttctcctcttcctggactcaaggttctagagggtgaacaacttctgctcgtgttggagcgcagagggtgcacagagttttcacggcaatcctctgaccactgcagggccttcgcacccaccatggttacccggcccttgccctcttgctctgtgttgtggagaccatctgggagccccaggcatggagtagtgggcaccacgggggctcagggtcctgtgggtggaggagtcaggaatgggaactggtacttgggtggggaggactggctgggtctgagtttctgctattcttgctccccagggagccccgggcactgtggtgtctccagtccccaccccaggtcaggaggccagcttggtctaggaggagaggctggactttggagggtgggtgtgagagccttcgccaaaactggccccagccacccagtggccagcatgacaaggtgaggctctaacactgtcactttctgcatcctgttgtaggtttttctggcattgtctgcccagctgctccaagccaggctgatgaaggaggtgtcccctgtggtgagctggaggttggagcctgaatatggcacagctctgtgattcatctcctatggttgtggcagccatggtgatggagacggcagctcaacaggagcggtaggagggtacctgtggaggccaagtggtaggagccttggagggtgggcaggtgcatggagggtgacagcagcgctggttcctttggcgtcagtgctaatggtggcagcagcagcaagtctaggggccaggaagggggagtaggagggctttggggcctggcccagcctgggatgtgtaagaagctgctggttctgtaccacaggcctcagtgatggtggaggtgcagccagggcaaggaggagtcctcccccttctcctgcagtctctggagggtgccctccttctgctggcatctgagccaggtgtgagtggcagcattgttttgttcttaacagaatttaggggcttacgatttgtgtatctttttgtttttggttgtgataaaccttaagggacaaaaggcttctttcctgggttttggtgttgtgggatccccccatgtaagataaagggtgctttcttggcaagctgtgtgttggagggagttcaccaaggggaagaaagggaacctctcaggagggtggctgctgtggcaggtcccctgcctctgggcaccctttgggccacctagtttcccctgtggaagaggggaggcttagaccagtaccacttgtatcatcaaagaggcatcctcctgggccagttgatttgaccttcccacttcttcagcccacctgcccatggtgtcacctggggaaagtggaaccttaggccacaggggcagaggcttctctggcaggctgattgctgtagcagattctgttctgcctgctgctcaggagggcttctatggccaggaagtgatgctgggactcttctgttggtgttctgctgcctccgtgttgtctctggcttctcacggactctcagatgtgtgaaggcaaaaaggtttcctggctagtttgcgtggtgtggttgggatcacttttgctacatgcctctcaggcaccctagtgggggaaaagggaattttagatttaaggagaatgtgtctatgttggctgcttattgttagcaaatttctgaacaattctattctaaatggtcgcctcttgttgagtagactccagctccattggagaagagatgagcttacctgggctgtgttttcttgctagcttgagggttgaaaacactaggattttgtctccttttccagttgagttagggaagtgacatgcattgccacaaaacaatttcttcagttctggagtccttagacagtcatcttactagcaccttccagcattctcctttcagtgagataataagggagggttcctaatctaaaaggaaacatggatggtgttcttatgttgtatgacaagaaatatgaaataattctgaaaaatttagtcattcttcttttaaatttagaaacccgttttttatatttataatatttaaagccattaaaagttaagatgtcataattaaaataatcttttaacattaattagcatttagcagatgaccacaataaattatttttaattatgctaaaaaaaaaaaaaaaaaaaaaaaaaaaaaaaaaaaaaaaaaaaaaaaaaaa

SEQ ID NO: 720 - DNA, 1002 bp, Homo sapiens
atgcaggccgctgggcacccagagccccttgacagcaggggctccttctccctccccacgatgggtgccaacgtctctcaggacaatggcactggccacaatgccaccttctccgagccactgccgttcctctatgtgctcctgcccgccgtgtactccgggatctgtgctgtggggctgactggcaacacggccgtcatccttgtaatcctaagggcgcccaagatgaagacggtgaccaacgtgttcatcctgaacctggccgtcgccgacgggctcttcacgctggtactgcccgtcaacatcgcggagcacctgctgcagtactggcccttcggggagctgctctgcaagctggtgctggccgtcgaccactacaacatcttctccagcatctacttcctagccgtgatgagcgtggaccgatacctggtggtgctggccaccgtgaggtcccgccacatgccctggcgcacctaccggggggcgaaggtcgccagcctgtgtgtctggctgggcgtcacggtcctggttctgcccttcttctctttcgctggcgtctacagcaacgagctgcaggtcccaagctgtgggctgagcttcccgtggcccgagcaggtctggttcaaggccagccgtgtctacacgttggtcctgggcttcgtgctgcccgtgtgcaccatctgtgtgctctacacagacctcctgcgcaggctgcgggccgtgcggctccgctctggagccaaggctctaggcaaggccaggcggaaggtgaccgtcctggtcctcgtcgtgctggccgtgtgcctcctctgctggacgcccttccacctggcctctgtcgtggccctgaccacggacctgccccagaccccactggtcatcagtatgtcctacgtcatcaccagcctcagctacgccaactcgtgcctgaaccccttcctctacgcctttctagatgacaacttccggaagaacttccgcagcatattgcggtgctga

SEQ ID NO: 721 - DNA, 3548 bp, Homo sapiens
gaacccaggaggcagagcttgcagtgagccgagactgcgccaccgcgctccagcctgggtgacagagcgagaccccatctcaaaaaaaaaaaagttaggccgagcatggtgactcacatctgtaatcccagcactttgggagaccaaggcgagaagatggcttgaggccaggaattcaaggccagcctgggcaacatagacctctgtctctataaaaaatacaaaaaattggatgggtatggtggcatgtgcctgtagtcccagctactctggagtctgaggcgagaggttcacttgggcccgggaggtcaaggttgcagtgagctgtcattgcgccactgcaaaccagcctgggcaatagagtgagaccctgtctctatgaactgtgtggtcagtcagctgtggagctccgtatgctggccaagttctgatgtgctctctggacctccaaggtcaggacatgggggtccactggccctgtggggacaggcatgcattttttaccccagctcagccaccatctccctgcctgcggtacacctggcccctgtccccaccacatcccaccacctgtacaatgggacccttgggtaccatgccatcagttgctggtgaggcccaggtgagttcgttcctgtaatgcccttaggaaagtacctgtcaccagaaatttttaaagctctcaaggtgattccaatgcggagctggggctgagatgctccaggttttgaggactttggccaagggcgtgaacctcttagaggaggaatggctgggcaataatgggggctttgctcaccactttagctcaggactctcaacccccctttaaaatgaggtgcaaaataaatttaagggacttgaactcagggaacactttttgtagttgttgatacaggatctcactctgctgcccaggctggagtacagtggcacaatcacagctcactgaagtctcgacctcccaggctcaagcgatcctcctgcctcagacaccagagtagctgggaccacaggtgtgtgccaacacacctggctaattttttgtagagacaaggtttccctacatttcccaggctggtcttgaactcctggactcaagcgactgacccgtctcagcctcccaaggtgttgggaccacaggcgtgaaccactgtgtccacccctgcctctattttttttaaaaagaaagttagattaggaagcagattcaggtttattaaattatgcttgtaaatgaaagaatcttttgttattccattttataatctttcaaaggaacaggttagaagagccaaccattctgatcagttaggatgggaatgatggtttgagatacctgaccagggcatcctgtggttatggccttaatgtggatttcttctgttgagatgcagattcctcagagtccgtgtcatcttaggaacggtctgatctttacgtattctggatgctaaatcttagtccagccaaacaggaatgacaatggccaaagcatcaactatagaaaacataatctatgggggttataatttatattcataacaagtgcaaacccatggaatatctgagagcactgcacatgcatcgtgccgtggagagttttgaaattagacatggtgagtatggtacttactggacactgaattcctgctctagcaattgagtactacagaataaattatttaacttccataaacctaattttccttatctaaaaataaagaaaacaagtctaatctttttggcaatttttaaaatttatttttttactgatttcttatcagttgatttttgaggattaaaaaaattactatgagttggccgggcgcggtggctcacacctgtaatcctagcactttgggaggccgaggcgggcggatcatgaggtcaggagattgagaccatcctggctaacatggtgaaaccccgtctgtactaaaaatacaaaaaaaattagctgggcatggtggcaggcgccagtagtcccagctacttgggaggcctaggcaggagaatggtgtgaacccgggaggcagagcttgtggtgagccgagatcgcgccactgcactccaggcctgggtgacagtgcgagaccctgtctcaaaaaaaaaaaaaaaattactatggccaagccacatgaatgtacatgaattgcagatctaagaaggaatgttcttgggcaaaattcacattttaaataatgtaaaacaaggttgttgctttgacactctccctgctttagcttaaatttaaattagagaaaggatatatattctgccatagaaatgctacatgtacatttttctgttctaatcatagcataagaaaccaggagttatttaaaatcgttaaacctattggtaaattacagtcagaaaaagataacattatgtcaaaataaaaattgtttctgagaaacactcttcaacattaaaatgaacaattttacatctattcaaaagggtcttctattcagctatttaggggccatatactacattatatagcatctcaatattagacattctgtaggagtcttaggtttttttgtggcttaagtaaccaattgatactacttgccctcaacatttttctagaccaaaattacctttgccacagaattctgagatctcacccaagctcctgtccaagcatctgagcagatccaaagactattagtgaatcacatcccagttcacaagcttttccatagccaactccatctagatacaaattagcagcctccctcagcaaaaatacaaatcatgctccagaatttttagaatggattatcaacctgcaacctagatgtccagttcctaacagacacaaatccttcctcaatcaatacagagcaaacacacttagggaattttccagaaattcagtcctgatttgtctgccatccagatcctataaacaaccacctaaagggagatatttaaaacatttgttcccataggttctccaagttctcaccttgaaacagattaaagaactagaaaaaagagacttaagatcattttttagtaggaaggctttataaaattagagctcattatgttcagtttttattcagttttaaaatatacaaagctgactctaggcaaatactatgcaaccactctctattacatttctcaacacctcttacgtaaagataagaatgataatgtacttatttacaaggttttaataccacaatgagtttgcattttaaagaaatatttaatctaaaagaaaactcacgtaactacagaggtttttatattactaaagactctactgacctatcttcaaagctcataaaatataaatatatttcagataaaccaattacatttttaaaagaaaaataataaccagatattattcaaggcttaacaataacttgtctacttaaaaaaaaattacctgtagtagccctccatcatcaaaacgcagtacttctattatgctctctgactgaacgaatgcttccttctcggcccgcgccgcagccactacgagggtcatcaccaggtgcagcgctcctaggaggccg

SEQ ID NO: 722 - DNA, 1371 bp, Homo sapiens
ccctctgttttagtaaccacagggaaacatggcggcacggggtaagtggtagaaatatctattatatttaggaaccatatcacgaacttagcctgtgtttaaaccgtagcctctcccttttaataaacagatcacaaatatggcaagtggcattgcctctcagatcacaaatcgagcacacggctaagctgtgcaatgtgacatttgttagattcaattatacatcctggcctcatctttttaaatttatttgttgcttatgaaattttaattagctaaagaaaaacaaacactttatagaaacaaggtaacagaggccataaagcacataaaccaccagccccatagaagcacttaaaaagataggtagagatcacatctaggaagttacagagtcaaggcagagaaaactgtagaagaaacacaccgaccccactagagttggcactgtgagggcatccgagcagccatggggtagaccaaggacctttccttgtgaagctcttttgtcctcgtgaatcattatatgtggggacagctgggagttataatttggaatattgcaaagcaaatatgtacttctctcactttggggtatattcctgcctgttggtgttagactcggctaggtgacttgctttgggcaatgaggtgttagcagctgtggaatgagcagaggcaatcggtcatgacctcttgcaccaaagacatctcaatgagaaaaacttgccttgagtttctgctgcctggacctagaatgaatacatgagacagacctgacccaatttcctctagaagcagagcctcccagctgagcccagcctggatcaaccgggtctccgcctacctgcggatcctggaacatcagggtcaatgcttcttgtgatatgtcactgaatttgggggtggctgcaacctcattgtgcaacattaactatcacccttgcaatttccaagggcaagagtaacgacacgatgggggcagggagcagctccagggaaaaggctgcacaggtggacctggatctggagtggaggtcaggtccaatgaataaaagggaggaaaagaccttgcatctctgcagtggtgcaatcgcatctctgcagtggtgctgactccaggttcagtgactttcaccttcatagagaaacagcgatgaaccgcctttaagggacttatctgtattccatgctctctgcacattcaggaactgtttctggctcactgagactcattctattttatggcaaattctgtcccattatttctctctgtctctttttttttttttttttctgagacagagttctgtcgcccaggctggagtgaaactccatctcaaaaaaaagacaaaaaaaaaaaaaaaaaaa

SEQ ID NO: 723 - DNA, 2212 bp, Homo sapiens
cttcaggagaggatctgtaagagtacacaaacagagtgagccattgccatagaatattctcttgacaggaccctagctcataaacatttcttcagaactatacttcaaatgggatgctttgtattaaaactttaataaatttaatttattttttcttttgaatataaataactgagcttaagcattatcatcatatcgatttcttatgctgcctaaacctcttaattttagtcgaaatatatctttttttttttttggaggcggaatttcattcttgttgcccaggctggagtgcaatggcacggtctcggcttaccgcaacctccgcctcccgggttcaggcggttctcctgcctcggactcccgagtagctgggactacaggcatgtgccactacgcccggctaattttgtatttttagtagggacagggtttctccatgttggtcaggttgctctcaaactcccaacctcaggtgatctgcccgcctcggcctcccaaagtgctgggattactgagccactgtgcccagcccaaaatgtatcttatacaaacattgtagaaatgaataatgattactcaaataagatcttttaattataagcttctggcatctctatttttcccttaagtaggggatactaaagtgaatgattttctaagaggatcttttgaaactctttagtacaatatttgagtaaaataaattattgtggatcttttgaaactctgtgtagtattcgagtaaaataaatatttgacatttacagtagggtacaccctaagttgtttatgaattccttataccactgttatatttaatttttcagataaaatatgtatgggaaaatgactagagaaattgattcttttttaggctcagggacaagataagtgactaattatgaaccccaagctctaattgtatgttcagagtgatgtctccataaaattacaaatgtcatgtactttcagggtagctccttatttagtcagaaatctcagagattaaatgtgtgaatatttagggtttttgcatatttttgaccaaccaatgaaagcgaattagttcagtttagaaagtttgatgtctatacttgtatatacctctttaaattttagaacttcgtaggttattcatttttaaagagcaataaagtttgtataagatagtgattgctttccttctattctttaaatatcaaaaatagagtatctctctgtcttcactattctcatccttggacatttcctctcccctccccttggtattctcttttttgaggggggggtgttctaggtgagttaatccttagtattttcagtagtcattgctataaaactctcagcttcccctccatactttcaacctaacacttctctctcccaacttatctctgtgtaatctcccagttcatgattaacaaattataattttattgagggactgttctaatcctgatatctcagattttcttggctgttatctccctatctttctgtattctatgtcagtcagagccaaaatccttttcatcatcccaaatctttctatccgccacatcactgattcatacaccctagtcttccatcacagtctcttaatttttaagttttttttttcttactactcctttcatacttattctttaatttcatggaaacactagagtagctatcttaaactaagactacagaccattaaaaagtcagtttctcagccaggcacgagaaactactaacacctgtaatcccagcactttgggaggccaaggcgggcagatcacgagaggtcaaggagatcgagaccatcctggctaatacggtgaggccccgtctccactaaaaatagaaaaaattagccaggcgcctgtagtcccagctacttgggaggctgaggcaggagaacggcgtgaacccgggaggcggagcttgcagtgagccgagatggtgccactgcactccagcctgggtgacagagcgagactccatctcaaaaaaaaaaaaaaaacagtttctcagtccatgtaaccacctttcaaatgatcagtagccacatgtggctagtggttaccatattagacaattgaggaaatattgaacatttccatcatcacagaaagtacggttggactatgggccaaatctagcacaccacctgcttctgggtggtcttcaacctaagaatagtttttacgtttttaaatagttg

SEQ ID NO: 724 - DNA, 673 bp, Homo sapiens
agggaactgatttgctgtctctcagcaataaaggattactgcatgaataaggatgacaaatgagaattctggactgtcccccccggctcctgaataatcccaggcattcaagaatacttctcttctgctattacaatgaattacatgtggagctatgaggacttcgggcttgaacagttgccgtagagctctccgtcttgctggaagggcttcttccaggccttggtcaggaggctccctgggtgctacatacaggattttttttgaggatatggagatgcgcaggacacgatcccagcaatccaggtgcttactggctgattgtacagccatgcacacagagtgccacgatgcaaaataggatgtggtaagggtcatgcagttcagaggagaaagcaagtgtggctgatgaacatcacggagcagtgaccttcatggacagacagaatttgagctggccctttaaccaatgaggaggattcaaacagagtttgtattatcctgaaaagaaattccactaaagatgaatagcagagaactgtgttcagaatacaagttccacaaaggtagagatcttgtccctctggctacctgttgactctcctgtgcctaatacagtgcctgattcatactactcaataaatacttatggaataaaaaaaaaaaaaaaaaa
